(19) United States
(12) Patent Application Publication
(10) Pub. No.: US 2002/0177552 A1
(43) Pub. Date: Nov. 28, 2002

(54) Compositions and methods for the therapy and diagnosis of colon cancer

(75) Inventors: Yuqiu Jiang, Kent, WA (US); Susan L. Harlocker, Seattle, WA (US); Heather Secrist, Seattle, WA (US)

Correspondence Address: SEED INTELLECTUAL PROPERTY LAW GROUP PLLC, 701 FIFTH AVE, SUITE 6300, SEATTLE, WA, 98104-7092, US

(73) Assignee: Corixa Corporation, Seattle, WA

(21) Appl. No.: 09/878,178

(22) Filed: Jun. 8, 2001

Related U.S. Application Data
(60) Provisional application No. 60/270,216, filed on Feb. 20, 2001.
(60) Provisional application No. 60/210,899, filed on Jun. 9, 2000.

(51) Int. Cl. A61K 38/17; C12P 21/02; C12N 5/06; C07H 21/04; C12N 9/00

(52) U.S. Cl. 514/12; 435/183; 435/320.1; 435/325; 435/69.1; 536/23.2

(57) ABSTRACT

Compositions and methods for the therapy and diagnosis of cancer, such as colon cancer, are disclosed. Compositions may comprise one or more colon tumor proteins, immunogenic portions thereof, or polynucleotides that encode such portions. Alternatively, a therapeutic composition may comprise an antigen presenting cell that expresses a colon tumor protein, or a T cell that is specific for cells expressing such a protein. Such compositions may be used, for example, for the prevention and treatment of diseases such as colon cancer. Diagnostic methods based on detecting a colon tumor protein, or mRNA encoding such a protein, in a sample are also provided.

### CROSS REFERENCE TO RELATED APPLICATIONS

[0001] This application claims priority to U.S. Provisional Application No. 60/270,216 filed Feb. 20, 2001 and U.S. Provisional Application No. 60/210,899 filed Jun. 9, 2000, incorporated by reference in their entirety herein.

### TECHNICAL FIELD OF THE INVENTION

[0002] The present invention relates generally to therapy and diagnosis of cancer, such as colon cancer. The invention is more specifically related to polypeptides comprising at least a portion of a colon tumor protein, and to polynucleotides encoding such polypeptides. Such polypeptides and polynucleotides may be used in vaccines and pharmaceutical compositions for prevention and treatment of colon malignancies, and for the diagnosis and monitoring of such cancers.

### BACKGROUND OF THE INVENTION

[0003] Cancer is a significant health problem throughout the world. Although advances have been made in detection and therapy of cancer, no vaccine or other universally successful method for prevention or treatment is currently available. Current therapies, which are generally based on a combination of chemotherapy or surgery and radiation, continue to prove inadequate in many patients.

[0004] Colon cancer is the second most frequently diagnosed malignancy in the United States as well as the second most common cause of cancer death. The five-year survival rate for patients with colorectal cancer detected in an early localized stage is 92%; unfortunately, only 37% of colorectal cancer is diagnosed at this stage. The survival rate drops to 64% if the cancer is allowed to spread to adjacent organs or lymph nodes, and to 7% in patients with distant metastases.

[0005] The prognosis of colon cancer is directly related to the degree of penetration of the tumor through the bowel wall and the presence or absence of nodal involvement, consequently early detection and treatment are especially important. Currently, diagnosis is aided by the use of screening assays for fecal occult blood, sigmoidoscopy, colonoscopy and double contrast barium enemas. Treatment regimens are determined by the type and stage of the cancer, and include surgery, radiation therapy and/or chemotherapy. Recurrence following surgery (the most common form of therapy) is a major problem and is often the ultimate cause of death.

[0006] In spite of considerable research into therapies for these and other cancers, colon cancer remains difficult to diagnose and treat effectively. Accordingly, there is a need in the art for improved methods for detecting and treating such cancers. The present invention fulfills these needs and further provides other related advantages.

### SUMMARY OF THE INVENTION

[0007] In one aspect, the present invention provides polynucleotide compositions comprising a sequence selected from the group consisting of:

[0008] (a) sequences provided in SEQ ID NO:1-2234;

[0009] (b) complements of the sequences provided in SEQ ID NO:1-2234;

[0010] (c) sequences consisting of at least 20, 25, 30, 35, 40, 45, 50, 75 and 100 contiguous residues of a sequence provided in SEQ ID NO:1-2234;

[0011] (d) sequences that hybridize to a sequence provided in SEQ ID NO:1-2234, under moderate or highly stringent conditions;

[0012] (e) sequences having at least 75%, 80%, 85%, 90%, 95%, 96%, 97%, 98% or 99% identity to a sequence of SEQ ID NO:1-2234;

[0013] (f) degenerate variants of a sequence provided in SEQ ID NO:1-2234.

[0014] In one preferred embodiment, the polynucleotide compositions of the invention are expressed in at least about 20%, more preferably in at least about 30%, and most preferably in at least about 50% of colon tumor samples tested, at a level that is at least about 2-fold, preferably at least about 5-fold, and most preferably at least about 10-fold higher than that for normal tissues.

[0015] The present invention, in another aspect, provides polypeptide compositions comprising an amino acid sequence that is encoded by a polynucleotide sequence described above.

[0016] The present invention further provides polypeptide compositions comprising an amino acid sequence selected from the group consisting of the sequence recited in SEQ ID NO:2235.

[0017] In certain preferred embodiments, the polypeptides and/or polynucleotides of the present invention are immunogenic, i.e., they are capable of eliciting an immune response, particularly a humoral and/or cellular immune response, as further described herein.

[0018] The present invention further provides fragments, variants and/or derivatives of the disclosed polypeptide and/or polynucleotide sequences, wherein the fragments, variants and/or derivatives preferably have a level of immunogenic activity of at least about 50%, preferably at least about 70% and more preferably at least about 90% of the level of immunogenic activity of a polypeptide sequence set forth in SEQ ID NO:2235 or a polypeptide sequence encoded by a polynucleotide sequence set forth in SEQ ID NO:1-2234.

[0019] The present invention further provides polynucleotides that encode a polypeptide described above, expression vectors comprising such polynucleotides and host cells transformed or transfected with such expression vectors.

[0020] Within other aspects, the present invention provides pharmaceutical compositions comprising a polypeptide or polynucleotide as described above and a physiologically acceptable carrier.

[0021] Within a related aspect of the present invention, the pharmaceutical compositions, e.g., vaccine compositions, are provided for prophylactic or therapeutic applications. Such compositions generally comprise an immunogenic polypeptide or polynucleotide of the invention and an immunostimulant, such as an adjuvant.

[0022] The present invention further provides pharmaceutical compositions that comprise: (a) an antibody or antigen-binding fragment thereof that specifically binds to a polypeptide of the present invention, or a fragment thereof; and (b) a physiologically acceptable carrier.

[0023] Within further aspects, the present invention provides pharmaceutical compositions comprising: (a) an antigen presenting cell that expresses a polypeptide as described above and (b) a pharmaceutically acceptable carrier or excipient. Illustrative antigen presenting cells include dendritic cells, macrophages, monocytes, fibroblasts and B cells.

[0024] Within related aspects, pharmaceutical compositions are provided that comprise: (a) an antigen presenting cell that expresses a polypeptide as described above and (b) an immunostimulant.

[0025] The present invention further provides, in other aspects, fusion proteins that comprise at least one polypeptide as described above, as well as polynucleotides encoding such fusion proteins, typically in the form of pharmaceutical compositions, e.g., vaccine compositions, comprising a physiologically acceptable carrier and/or an immunostimulant. The fusions proteins may comprise multiple immunogenic polypeptides or portions/variants thereof, as described herein, and may further comprise one or more polypeptide segments for facilitating the expression, purification and/or immunogenicity of the polypeptide(s).

[0026] Within further aspects, the present invention provides methods for stimulating an immune response in a patient, preferably a T cell response in a human patient, comprising administering a pharmaceutical composition described herein. The patient may be afflicted with colon cancer, in which case the methods provide treatment for the disease, or patient considered at risk for such a disease may be treated prophylactically.

[0027] Within further aspects, the present invention provides methods for inhibiting the development of a cancer in a patient, comprising administering to a patient a pharmaceutical composition as recited above. The patient may be afflicted with colon cancer, in which case the methods provide treatment for the disease, or patient considered at risk for such a disease may be treated prophylactically.

[0028] The present invention further provides, within other aspects, methods for removing tumor cells from a biological sample, comprising contacting a biological sample with T cells that specifically react with a polypeptide of the present invention, wherein the step of contacting is performed under conditions and for a time sufficient to permit the removal of cells expressing the protein from the sample.

[0029] Within related aspects, methods are provided for inhibiting the development of a cancer in a patient, comprising administering to a patient a biological sample treated as described above.

[0030] Methods are further provided, within other aspects, for stimulating and/or expanding T cells specific for a polypeptide of the present invention, comprising contacting T cells with one or more of: (i) a polypeptide as described above; (ii) a polynucleotide encoding such a polypeptide; and/or (iii) an antigen presenting cell that expresses such a polypeptide; under conditions and for a time sufficient to permit the stimulation and/or expansion of T cells. Isolated T cell populations comprising T cells prepared as described above are also provided.

[0031] Within further aspects, the present invention provides methods for inhibiting the development of a cancer in a patient, comprising administering to a patient an effective amount of a T cell population as described above.

[0032] The present invention further provides methods for inhibiting the development of a cancer in a patient, comprising the steps of: (a) incubating CD4⁺ and/or CD8⁺ T cells isolated from a patient with one or more of: (i) a polypeptide comprising at least an immunogenic portion of polypeptide disclosed herein; (ii) a polynucleotide encoding such a polypeptide; and (iii) an antigen-presenting cell that expressed such a polypeptide; and (b) administering to the patient an effective amount of the proliferated T cells, and thereby inhibiting the development of a cancer in the patient. Proliferated cells may, but need not, be cloned prior to administration to the patient.

[0033] Within further aspects, the present invention provides methods for determining the presence or absence of a cancer, preferably a colon cancer, in a patient comprising: (a) contacting a biological sample obtained from a patient with a binding agent that binds to a polypeptide as recited above; (b) detecting in the sample an amount of polypeptide that binds to the binding agent; and (c) comparing the amount of polypeptide with a predetermined cut-off value, and therefrom determining the presence or absence of a cancer in the patient. Within preferred embodiments, the binding agent is an antibody, more preferably a monoclonal antibody.

[0034] The present invention also provides, within other aspects, methods for monitoring the progression of a cancer in a patient. Such methods comprise the steps of: (a) contacting a biological sample obtained from a patient at a first point in time with a binding agent that binds to a polypeptide as recited above; (b) detecting in the sample an amount of polypeptide that binds to the binding agent; (c) repeating steps (a) and (b) using a biological sample obtained from the patient at a subsequent point in time; and (d) comparing the amount of polypeptide detected in step (c) with the amount detected in step (b) and therefrom monitoring the progression of the cancer in the patient.

[0035] The present invention further provides, within other aspects, methods for determining the presence or absence of a cancer in a patient, comprising the steps of: (a) contacting a biological sample, e.g., tumor sample, serum sample, etc., obtained from a patient with an oligonucleotide that hybridizes to a polynucleotide that encodes a polypeptide of the present invention; (b) detecting in the sample a level of a polynucleotide, preferably mRNA, that hybridizes to the oligonucleotide; and (c) comparing the level of polynucleotide that hybridizes to the oligonucleotide with a predetermined cut-off value, and therefrom determining the presence or absence of a cancer in the patient. Within certain embodiments, the amount of mRNA is detected via polymerase chain reaction using, for example, at least one oligonucleotide primer that hybridizes to a polynucleotide encoding a polypeptide as recited above, or a complement of such a polynucleotide. Within other embodiments, the amount of mRNA is detected using a hybridization technique, employing an oligonucleotide probe that hybridizes to a polynucleotide that encodes a polypeptide as recited above, or a complement of such a polynucleotide.

[0036] In related aspects, methods are provided for monitoring the progression of a cancer in a patient, comprising the steps of: (a) contacting a biological sample obtained from a patient with an oligonucleotide that hybridizes to a polynucleotide that encodes a polypeptide of the present invention; (b) detecting in the sample an amount of a polynucleotide that hybridizes to the oligonucleotide; (c) repeating steps (a) and (b) using a biological sample obtained from the patient at a subsequent point in time; and (d) comparing the amount of polynucleotide detected in step (c) with the amount detected in step (b) and therefrom monitoring the progression of the cancer in the patient.

[0037] Within further aspects, the present invention provides antibodies, such as monoclonal antibodies, that bind to a polypeptide as described above, as well as diagnostic kits comprising such antibodies. Diagnostic kits comprising one or more oligonucleotide probes or primers as described above are also provided.

[0038] These and other aspects of the present invention will become apparent upon reference to the following detailed description. All references disclosed herein are hereby incorporated by reference in their entirety as if each was incorporated individually.

### DETAILED DESCRIPTION OF THE INVENTION

[0039] The present invention is directed generally to compositions and their use in the therapy and diagnosis of cancer, particularly colon cancer. As described further below, illustrative compositions of the present invention include, but are not restricted to, polypeptides, particularly immunogenic polypeptides, polynucleotides encoding such polypeptides, antibodies and other binding agents, antigen presenting cells (APCs) and immune system cells (e.g., T cells).

[0040] The practice of the present invention will employ, unless indicated specifically to the contrary, conventional methods of virology, immunology, microbiology, molecular biology and recombinant DNA techniques within the skill of the art, many of which are described below for the purpose of illustration. Such techniques are explained fully in the literature. See, e.g., Sambrook, et al. Molecular Cloning: A Laboratory Manual (2nd Edition, 1989); Maniatis et al. Molecular Cloning: A Laboratory Manual (1982); DNA Cloning: A Practical Approach, vol. I & II (D. Glover, ed.); Oligonucleotide Synthesis (N. Gait, ed., 1984); Nucleic Acid Hybridization (B. Hames & S. Higgins, eds., 1985); Transcription and Translation (B. Hames & S. Higgins, eds., 1984); Animal Cell Culture (R. Freshney, ed., 1986); Perbal, A Practical Guide to Molecular Cloning (1984).

[0041] All publications, patents and patent applications cited herein, whether supra or infra, are hereby incorporated by reference in their entirety.

[0042] As used in this specification and the appended claims, the singular forms “a,” “an” and “the” include plural references unless the content clearly dictates otherwise.

[0043] POLYPEPTIDE COMPOSITIONS

[0044] As used herein, the term “polypeptide” ” is used in its conventional meaning, i.e., as a sequence of amino acids. The polypeptides are not limited to a specific length of the product; thus, peptides, oligopeptides, and proteins are included within the definition of polypeptide, and such terms may be used interchangeably herein unless specifically indicated otherwise. This term also does not refer to or exclude post-expression modifications of the polypeptide, for example, glycosylations, acetylations, phosphorylations and the like, as well as other modifications known in the art, both naturally occurring and non-naturally occurring. A polypeptide may be an entire protein, or a subsequence thereof. Particular polypeptides of interest in the context of this invention are amino acid subsequences comprising epitopes, i.e., antigenic determinants substantially responsible for the immunogenic properties of a polypeptide and being capable of evoking an immune response.

[0045] Particularly illustrative polypeptides of the present invention comprise those encoded by a polynucleotide sequence set forth in any one of SEQ ID NO:1-2234, or a sequence that hybridizes under moderately stringent conditions, or, alternatively, under highly stringent conditions, to a polynucleotide sequence set forth in any one of SEQ ID NO:1-2234. Certain other illustrative polypeptides of the invention comprise amino acid sequences as set forth in SEQ ID NO:2235.

[0046] The polypeptides of the present invention are sometimes herein referred to as colon tumor proteins or colon tumor polypeptides, as an indication that their identification has been based at least in part upon their increased levels of expression in colon tumor samples. Thus, a “colon tumor polypeptide” or “colon tumor protein,” refers generally to a polypeptide sequence of the present invention, or a polynucleotide sequence encoding such a polypeptide, that is expressed in a substantial proportion of colon tumor samples, for example preferably greater than about 20%, more preferably greater than about 30%, and most preferably greater than about 50% or more of colon tumor samples tested, at a level that is at least two fold, and preferably at least five fold, greater than the level of expression in normal tissues, as determined using a representative assay provided herein. A colon tumor polypeptide sequence of the invention, based upon its increased level of expression in tumor cells, has particular utility both as a diagnostic marker as well as a therapeutic target, as further described below.

[0047] In certain preferred embodiments, the polypeptides of the invention are immunogenic, i.e., they react detectably within an immunoassay (such as an ELISA or T-cell stimulation assay) with antisera and/or T-cells from a patient with colon cancer. Screening for immunogenic activity can be performed using techniques well known to the skilled artisan. For example, such screens can be performed using methods such as those described in Harlow and Lane, Antibodies: A Laboratory Manual, Cold Spring Harbor Laboratory, 1988. In one illustrative example, a polypeptide may be immobilized on a solid support and contacted with patient sera to allow binding of antibodies within the sera to the immobilized polypeptide. Unbound sera may then be removed and bound antibodies detected using, for example, ¹²⁵I-labeled Protein A.

[0048] As would be recognized by the skilled artisan, immunogenic portions of the polypeptides disclosed herein are also encompassed by the present invention. An “immunogenic portion,” as used herein, is a fragment of an immunogenic polypeptide of the invention that itself is immunologically reactive (i.e., specifically binds) with the B-cells and/or T-cell surface antigen receptors that recognize the polypeptide. Immunogenic portions may generally be identified using well known techniques, such as those summarized in Paul, Fundamental Immunology, 3rd ed., 243-247 (Raven Press, 1993) and references cited therein. Such techniques include screening polypeptides for the ability to react with antigen-specific antibodies, antisera and/or T-cell lines or clones. As used herein, antisera and antibodies are “antigen-specific” if they specifically bind to an antigen (i.e., they react with the protein in an ELISA or other immunoassay, and do not react detectably with unrelated proteins). Such antisera and antibodies may be prepared as described herein, and using well-known techniques.

[0049] In one preferred embodiment, an immunogenic portion of a polypeptide of the present invention is a portion that reacts with antisera and/or T-cells at a level that is not substantially less than the reactivity of the full-length polypeptide (e.g., in an ELISA and/or T-cell reactivity assay). Preferably, the level of immunogenic activity of the immunogenic portion is at least about 50%, preferably at least about 70% and most preferably greater than about 90% of the immunogenicity for the full-length polypeptide. In some instances, preferred immunogenic portions will be identified that have a level of immunogenic activity greater than that of the corresponding full-length polypeptide, e.g., having greater than about 100% or 150% or more immunogenic activity.

[0050] In certain other embodiments, illustrative immunogenic portions may include peptides in which an N-terminal leader sequence and/or transmembrane domain have been deleted. Other illustrative immunogenic portions will contain a small N- and/or C-terminal deletion (e.g., 1-30 amino acids, preferably 5-15 amino acids), relative to the mature protein.

[0051] In another embodiment, a polypeptide composition of the invention may also comprise one or more polypeptides that are immunologically reactive with T cells and/or antibodies generated against a polypeptide of the invention, particularly a polypeptide having an amino acid sequence disclosed herein, or to an immunogenic fragment or variant thereof.

[0052] In another embodiment of the invention, polypeptides are provided that comprise one or more polypeptides that are capable of eliciting T cells and/or antibodies that are immunologically reactive with one or more polypeptides described herein, or one or more polypeptides encoded by contiguous nucleic acid sequences contained in the polynucleotide sequences disclosed herein, or immunogenic fragments or variants thereof, or to one or more nucleic acid sequences which hybridize to one or more of these sequences under conditions of moderate to high stringency.

[0053] The present invention, in another aspect, provides polypeptide fragments comprising at least about 5, 10, 15, 20, 25, 50, or 100 contiguous amino acids, or more, including all intermediate lengths, of a polypeptide compositions set forth herein, such as those set forth in SEQ ID NO:2235, or those encoded by a polynucleotide sequence set forth in a sequence of SEQ ID NO:1-2234.

[0054] In another aspect, the present invention provides variants of the polypeptide compositions described herein. Polypeptide variants generally encompassed by the present invention will typically exhibit at least about 70%, 75%, 80%, 85%, 90%, 91%, 92%, 93%, 94%, 95%, 96%, 97%, 98%, or 99% or more identity (determined as described below), along its length, to a polypeptide sequences set forth herein.

[0055] In one preferred embodiment, the polypeptide fragments and variants provided by the present invention are immunologically reactive with an antibody and/or T-cell that reacts with a full-length polypeptide specifically set forth herein.

[0056] In another preferred embodiment, the polypeptide fragments and variants provided by the present invention exhibit a level of immunogenic activity of at least about 50%, preferably at least about 70%, and most preferably at least about 90% or more of that exhibited by a full-length polypeptide sequence specifically set forth herein.

[0057] A polypeptide “variant,” as the term is used herein, is a polypeptide that typically differs from a polypeptide specifically disclosed herein in one or more substitutions, deletions, additions and/or insertions. Such variants may be naturally occurring or may be synthetically generated, for example, by modifying one or more of the above polypeptide sequences of the invention and evaluating their immunogenic activity as described herein and/or using any of a number of techniques well known in the art.

[0058] For example, certain illustrative variants of the polypeptides of the invention include those in which one or more portions, such as an N-terminal leader sequence or transmembrane domain, have been removed. Other illustrative variants include variants in which a small portion (e.g., 1-30 amino acids, preferably 5-15 amino acids) has been removed from the N- and/or C-terminal of the mature protein.

[0059] In many instances, a variant will contain conservative substitutions. A “conservative substitution” is one in which an amino acid is substituted for another amino acid that has similar properties, such that one skilled in the art of peptide chemistry would expect the secondary structure and hydropathic nature of the polypeptide to be substantially unchanged. As described above, modifications may be made in the structure of the polynucleotides and polypeptides of the present invention and still obtain a functional molecule that encodes a variant or derivative polypeptide with desirable characteristics, e.g., with immunogenic characteristics. When it is desired to alter the amino acid sequence of a polypeptide to create an equivalent, or even an improved, immunogenic variant or portion of a polypeptide of the invention, one skilled in the art will typically change one or more of the codons of the encoding DNA sequence according to Table 1.

[0060] For example, certain amino acids may be substituted for other amino acids in a protein structure without appreciable loss of interactive binding capacity with structures such as, for example, antigen-binding regions of antibodies or binding sites on substrate molecules. Since it is the interactive capacity and nature of a protein that defines that protein's biological functional activity, certain amino acid sequence substitutions can be made in a protein sequence, and, of course, its underlying DNA coding sequence, and nevertheless obtain a protein with like properties. It is thus contemplated that various changes may be made in the peptide sequences of the disclosed compositions, or corresponding DNA sequences which encode said peptides without appreciable loss of their biological utility or activity.

TABLE 1

| Amino Acids | | | Codons |
|---|---|---|---|
| Alanine | Ala | A | GGA GCC GCG GCU |
| Cysteine | Gys | C | UGC UGU |
| Aspartic acid | Asp | D | GAC GAU |
| Glutamic acid | Glu | E | GAA GAG |
| Phenylalanine | Phe | F | UUC UUU |
| Glycine | Gly | G | GGA GGC GGG GGU |
| Histidine | His | H | CAC CAU |
| Isoleucine | Ile | I | AUA AUC AUU |
| Lysine | Lys | K | AAA AAG |
| Leucine | Leu | L | UUA UUG CUA CUC CUG CUU |
| Methionine | Met | M | AUG |
| Asparagine | Asn | N | AAC AAU |
| Proline | Pro | P | CCA CCC GCG GGU |
| Glutamine | Gln | Q | CAA CAG |
| Arginine | Arg | R | AGA AGG CGA CGC CGG CGU |
| Serine | Ser | S | AGC AGU UCA UCC UCG UCU |
| Threonine | Thr | T | ACA ACC ACG ACU |
| Valine | Val | V | GUA GUC GUG GUU |
| Tryptophan | Trp | W | UGG |
| Tyrosine | Tyr | Y | UAC UAU |

[0061] In making such changes, the hydropathic index of amino acids may be considered. The importance of the hydropathic amino acid index in conferring interactive biologic function on a protein is generally understood in the art (Kyte and Doolittle, 1982, incorporated herein by reference). It is accepted that the relative hydropathic character of the amino acid contributes to the secondary structure of the resultant protein, which in turn defines the interaction of the protein with other molecules, for example, enzymes, substrates, receptors, DNA, antibodies, antigens, and the like. Each amino acid has been assigned a hydropathic index on the basis of its hydrophobicity and charge characteristics (Kyte and Doolittle, 1982). These values are: isoleucine (+4.5); valine (+4.2); leucine (+3.8); phenylalanine (+2.8); cysteine/cystine (+2.5); methionine (+1.9); alanine (+1.8); glycine (−0.4); threonine (−0.7); serine (−0.8); tryptophan (−0.9); tyrosine (−1.3); proline (−1.6); histidine (−3.2); glutamate (−3.5); glutamine (−3.5); aspartate (−3.5); asparagine (−3.5); lysine (−3.9); and arginine (4.5).

[0062] It is known in the art that certain amino acids may be substituted by other amino acids having a similar hydropathic index or score and still result in a protein with similar biological activity, i.e. still obtain a biological functionally equivalent protein. In making such changes, the substitution of amino acids whose hydropathic indices are within ±2 is preferred, those within ±1 are particularly preferred, and those within ±0.5 are even more particularly preferred. It is also understood in the art that the substitution of like amino acids can be made effectively on the basis of hydrophilicity. U.S. Pat. 4,554,101 (specifically incorporated herein by reference in its entirety), states that the greatest local average hydrophilicity of a protein, as governed by the hydrophilicity of its adjacent amino acids, correlates with a biological property of the protein.

[0063] As detailed in U.S. Pat. 4,554,101, the following hydrophilicity values have been assigned to amino acid residues: arginine (+3.0); lysine (+3.0); aspartate (+3.0±1); glutamate (+3.0±1); serine (+0.3); asparagine (+0.2); glutamine (+0.2); glycine (0); threonine (−0.4); proline (−0.5±1); alanine (−0.5); histidine (−0.5); cysteine (−1.0); methionine (−1.3); valine (−1.5); leucine (−1.8); isoleucine (−1.8); tyrosine (−2.3); phenylalanine (−2.5); tryptophan (−3.4). It is understood that an amino acid can be substituted for another having a similar hydrophilicity value and still obtain a biologically equivalent, and in particular, an immunologically equivalent protein. In such changes, the substitution of amino acids whose hydrophilicity values are within ±2 is preferred, those within ±1 are particularly preferred, and those within ±0.5 are even more particularly preferred.

[0064] As outlined above, amino acid substitutions are generally therefore based on the relative similarity of the amino acid side-chain substituents, for example, their hydrophobicity, hydrophilicity, charge, size, and the like. Exemplary substitutions that take various of the foregoing characteristics into consideration are well known to those of skill in the art and include: arginine and lysine; glutamate and aspartate; serine and threonine; glutamine and asparagine; and valine, leucine and isoleucine.

[0065] In addition, any polynucleotide may be further modified to increase stability in vivo. Possible modifications include, but are not limited to, the addition of flanking sequences at the 5′ and/or 3′ ends; the use of phosphorothioate or 2′ O-methyl rather than phosphodiesterase linkages in the backbone; and/or the inclusion of nontraditional bases such as inosine, queosine and wybutosine, as well as acetyl- methyl-, thio- and other modified forms of adenine, cytidine, guanine, thymine and uridine.

[0066] Amino acid substitutions may further be made on the basis of similarity in polarity, charge, solubility, hydrophobicity, hydrophilicity and/or the amphipathic nature of the residues. For example, negatively charged amino acids include aspartic acid and glutamic acid; positively charged amino acids include lysine and arginine; and amino acids with uncharged polar head groups having similar hydrophilicity values include leucine, isoleucine and valine; glycine and alanine; asparagine and glutamine; and serine, threonine, phenylalanine and tyrosine. Other groups of amino acids that may represent conservative changes include: (1) ala, pro, gly, glu, asp, gln, asn, ser, thr; (2) cys, ser, tyr, thr; (3) val, ile, leu, met, ala, phe; (4) lys, arg, his; and (5) phe, tyr, trp, his. A variant may also, or alternatively, contain nonconservative changes. In a preferred embodiment, variant polypeptides differ from a native sequence by substitution, deletion or addition of five amino acids or fewer. Variants may also (or alternatively) be modified by, for example, the deletion or addition of amino acids that have minimal influence on the immunogenicity, secondary structure and hydropathic nature of the polypeptide.

[0067] As noted above, polypeptides may comprise a signal (or leader) sequence at the N-terminal end of the protein, which co-translationally or post-translationally directs transfer of the protein. The polypeptide may also be conjugated to a linker or other sequence for ease of synthesis, purification or identification of the polypeptide (e.g., poly-His), or to enhance binding of the polypeptide to a solid support. For example, a polypeptide may be conjugated to an immunoglobulin Fc region.

[0068] When comparing polypeptide sequences, two sequences are said to be “identical” if the sequence of amino acids in the two sequences is the same when aligned for maximum correspondence, as described below. Comparisons between two sequences are typically performed by comparing the sequences over a comparison window to identify and compare local regions of sequence similarity. A “comparison window” as used herein, refers to a segment of at least about 20 contiguous positions, usually 30 to about 75, 40 to about 50, in which a sequence may be compared to a reference sequence of the same number of contiguous positions after the two sequences are optimally aligned.

[0069] Optimal alignment of sequences for comparison may be conducted using the Megalign program in the Lasergene suite of bioinformatics software (DNASTAR, Inc., Madison, Wis.), using default parameters. This program embodies several alignment schemes described in the following references: Dayhoff, M. O. (1978) A model of evolutionary change in proteins—Matrices for detecting distant relationships. In Dayhoff, M. O. (ed.) Atlas of Protein Sequence and Structure, National Biomedical Research Foundation, Washington D.C. Vol. 5, Suppl. 3, pp. 345-358; Hein J. (1990) Unified Approach to Alignment and Phylogenes pp. 626-645 Methods in Enzymology vol. 183, Academic Press, Inc., San Diego, Calif.; Higgins, D. G. and Sharp, P. M. (1989) CABIOS 5:151-153; Myers, E. W. and Muller W. (1988) CABIOS 4:11-17; Robinson, E. D. (1971) Comb. Theor 11:105; Saitou, N. Nei, M. (1987) Mol. Biol. Evol. 4:406-425; Sneath, P. H. A. and Sokal, R. R. (1973) Numerical Taxonomy—the Principles and Practice of Numerical Taxonomy, Freeman Press, San Francisco, Calif.; Wilbur, W. J. and Lipman, D. J. (1983) Proc. Natl. Acad., Sci. USA 80:726-730.

[0070] Alternatively, optimal alignment of sequences for comparison may be conducted by the local identity algorithm of Smith and Waterman (1981) Add. APL. Math 2:482, by the identity alignment algorithm of Needleman and Wunsch (1970) J. Mol. Biol. 48:443, by the search for similarity methods of Pearson and Lipman (1988) Proc. Natl. Acad. Sci. USA 85: 2444, by computerized implementations of these algorithms (GAP, BESTFIT, BLAST, FASTA, and TFASTA in the Wisconsin Genetics Software Package, Genetics Computer Group (GCG), 575 Science Dr., Madison, Wis.), or by inspection.

[0071] One preferred example of algorithms that are suitable for determining percent sequence identity and sequence similarity are the BLAST and BLAST 2.0 algorithms, which are described in Altschul et al. (1977) Nucl. Acids Res. 25:3389-3402 and Altschul et al. (1990) J. Mol. Biol. 215:403-410, respectively. BLAST and BLAST 2.0 can be used, for example with the parameters described herein, to determine percent sequence identity for the polynucleotides and polypeptides of the invention. Software for performing BLAST analyses is publicly available through the National Center for Biotechnology Information. For amino acid sequences, a scoring matrix can be used to calculate the cumulative score. Extension of the word hits in each direction are halted when: the cumulative alignment score falls off by the quantity X from its maximum achieved value; the cumulative score goes to zero or below, due to the accumulation of one or more negative-scoring residue alignments; or the end of either sequence is reached. The BLAST algorithm parameters W, T and X determine the sensitivity and speed of the alignment.

[0072] In one preferred approach, the “percentage of sequence identity” is determined by comparing two optimally aligned sequences over a window of comparison of at least 20 positions, wherein the portion of the polypeptide sequence in the comparison window may comprise additions or deletions (i.e., gaps) of 20 percent or less, usually 5 to 15 percent, or 10 to 12 percent, as compared to the reference sequences (which does not comprise additions or deletions) for optimal alignment of the two sequences. The percentage is calculated by determining the number of positions at which the identical amino acid residue occurs in both sequences to yield the number of matched positions, dividing the number of matched positions by the total number of positions in the reference sequence (i.e., the window size) and multiplying the results by 100 to yield the percentage of sequence identity.

[0073] Within other illustrative embodiments, a polypeptide may be a xenogeneic polypeptide that comprises an polypeptide having substantial sequence identity, as described above, to the human polypeptide (also termed autologous antigen) which served as a reference polypeptide, but which xenogeneic polypeptide is derived from a different, non-human species. One skilled in the art will recognize that “self”antigens are often poor stimulators of CD8+ and CD4+ T-lymphocyte responses, and therefore efficient immunotherapeutic strategies directed against tumor polypeptides require the development of methods to overcome immune tolerance to particular self tumor polypeptides. For example, humans immunized with prostase protein from a xenogeneic (non human) origin are capable of mounting an immune response against the counterpart human protein, e.g. the human prostase tumor protein present on human tumor cells. Accordingly, the present invention provides methods for purifying the xenogeneic form of the tumor proteins set forth herein, such as the polypeptide set forth in SEQ ID NO:2235, or those encoded by polynucleotide sequences set forth in SEQ ID NO:1-2234.

[0074] Therefore, one aspect of the present invention provides xenogeneic variants of the polypeptide compositions described herein. Such xenogeneic variants generally encompassed by the present invention will typically exhibit at least about 70%, 75%, 80%, 85%, 90%, 91%, 92%, 93%, 94%, 95%, 96%, 97%, 98%, or 99% or more identity along their lengths, to a polypeptide sequences set forth herein.

[0075] More particularly, the invention is directed to mouse, rat, monkey, porcine and other non-human polypeptides which can be used as xenogeneic forms of human polypeptides set forth herein, to induce immune responses directed against tumor polypeptides of the invention.

[0076] Within other illustrative embodiments, a polypeptide may be a fusion polypeptide that comprises multiple polypeptides as described herein, or that comprises at least one polypeptide as described herein and an unrelated sequence, such as a known tumor protein. A fusion partner may, for example, assist in providing T helper epitopes (an immunological fusion partner), preferably T helper epitopes recognized by humans, or may assist in expressing the protein (an expression enhancer) at higher yields than the native recombinant protein. Certain preferred fusion partners are both immunological and expression enhancing fusion partners. Other fusion partners may be selected so as to increase the solubility of the polypeptide or to enable the polypeptide to be targeted to desired intracellular compartments. Still further fusion partners include affinity tags, which facilitate purification of the polypeptide.

[0077] Fusion polypeptides may generally be prepared using standard techniques, including chemical conjugation. Preferably, a fusion polypeptide is expressed as a recombinant polypeptide, allowing the production of increased levels, relative to a non-fused polypeptide, in an expression system. Briefly, DNA sequences encoding the polypeptide components may be assembled separately, and ligated into an appropriate expression vector. The 3′ end of the DNA sequence encoding one polypeptide component is ligated, with or without a peptide linker, to the 5′ end of a DNA sequence encoding the second polypeptide component so that the reading frames of the sequences are in phase. This permits translation into a single fusion polypeptide that retains the biological activity of both component polypeptides.

[0078] A peptide linker sequence may be employed to separate the first and second polypeptide components by a distance sufficient to ensure that each polypeptide folds into its secondary and tertiary structures. Such a peptide linker sequence is incorporated into the fusion polypeptide using standard techniques well known in the art. Suitable peptide linker sequences may be chosen based on the following factors: (1) their ability to adopt a flexible extended conformation; (2) their inability to adopt a secondary structure that could interact with functional epitopes on the first and second polypeptides; and (3) the lack of hydrophobic or charged residues that might react with the polypeptide functional epitopes. Preferred peptide linker sequences contain Gly, Asn and Ser residues. Other near neutral amino acids, such as Thr and Ala may also be used in the linker sequence. Amino acid sequences which may be usefully employed as linkers include those disclosed in Maratea et al., Gene 40:39-46, 1985; Murphy et al., Proc. Natl. Acad Sci. USA 83:8258-8262, 1986; U.S. Pat. No. 4,935,233 and U.S. Pat. No. 4,751,180. The linker sequence may generally be from 1 to about 50 amino acids in length. Linker sequences are not required when the first and second polypeptides have non-essential N-terminal amino acid regions that can be used to separate the functional domains and prevent steric interference.

[0079] The ligated DNA sequences are operably linked to suitable transcriptional or translational regulatory elements. The regulatory elements responsible for expression of DNA are located only 5′ to the DNA sequence encoding the first polypeptides. Similarly, stop codons required to end translation and transcription termination signals are only present 3′ to the DNA sequence encoding the second polypeptide.

[0080] The fusion polypeptide can comprise a polypeptide as described herein together with an unrelated immunogenic protein, such as an immunogenic protein capable of eliciting a recall response. Examples of such proteins include tetanus, tuberculosis and hepatitis proteins (see, for example, Stoute et al. New Engl. J. Med., 336:86-91, 1997).

[0081] In one preferred embodiment, the immunological fusion partner is derived from a Mycobacterium sp., such as a Mycobacterium tuberculosis-derived Ra12 fragment. Ra12 compositions and methods for their use in enhancing the expression and/or immunogenicity of heterologous polynucleotide/polypeptide sequences is described in U.S. patent application No. 60/158,585, the disclosure of which is incorporated herein by reference in its entirety. Briefly, Ra12 refers to a polynucleotide region that is a subsequence of a Mycobacterium tuberculosis MTB32A nucleic acid. MTB32A is a serine protease of 32 KD molecular weight encoded by a gene in virulent and avirulent strains of M. tuberculosis. The nucleotide sequence and amino acid sequence of MTB32A have been described (for example, U.S. patent application No. 60/158,585; see also, Skeiky et al., Infection and Immun. (1999) 67:3998-4007, incorporated herein by reference). C-terminal fragments of the MTB32A coding sequence express at high levels and remain as a soluble polypeptides throughout the purification process. Moreover, Ra12 may enhance the immunogenicity of heterologous immunogenic polypeptides with which it is fused. One preferred Ra12 fusion polypeptide comprises a 14 KD C-terminal fragment corresponding to amino acid residues 192 to 323 of MTB32A. Other preferred Ra12 polynucleotides generally comprise at least about 15 consecutive nucleotides, at least about 30 nucleotides, at least about 60 nucleotides, at least about 100 nucleotides, at least about 200 nucleotides, or at least about 300 nucleotides that encode a portion of a Ra12 polypeptide. Ra12 polynucleotides may comprise a native sequence (i.e., an endogenous sequence that encodes a Ra12 polypeptide or a portion thereof) or may comprise a variant of such a sequence. Ra12 polynucleotide variants may contain one or more substitutions, additions, deletions and/or insertions such that the biological activity of the encoded fusion polypeptide is not substantially diminished, relative to a fusion polypeptide comprising a native Ra12 polypeptide. Variants preferably exhibit at least about 70% identity, more preferably at least about 80% identity and most preferably at least about 90% identity to a polynucleotide sequence that encodes a native Ra12 polypeptide or a portion thereof.

[0082] Within other preferred embodiments, an immunological fusion partner is derived from protein D, a surface protein of the gram-negative bacterium Haemophilus influenza B (WO 91/18926). Preferably, a protein D derivative comprises approximately the first third of the protein (e.g., the first N-terminal 100-110 amino acids), and a protein D derivative may be lipidated. Within certain preferred embodiments, the first 109 residues of a Lipoprotein D fusion partner is included on the N-terminus to provide the polypeptide with additional exogenous T-cell epitopes and to increase the expression level in E. coli (thus functioning as an expression enhancer). The lipid tail ensures optimal presentation of the antigen to antigen presenting cells. Other fusion partners include the non-structural protein from influenzae virus, NS1 (hemaglutinin). Typically, the N-terminal 81 amino acids are used, although different fragments that include T-helper epitopes may be used.

[0083] In another embodiment, the immunological fusion partner is the protein known as LYTA, or a portion thereof (preferably a C-terminal portion). LYTA is derived from Streptococcus pneumoniae, which synthesizes an N-acetyl-L-alanine amidase known as amidase LYTA (encoded by the LytA gene; Gene 43:265-292, 1986). LYTA is an autolysin that specifically degrades certain bonds in the peptidoglycan backbone. The C-terminal domain of the LYTA protein is responsible for the affinity to the choline or to some choline analogues such as DEAE. This property has been exploited for the development of E. coli C-LYTA expressing plasmids useful for expression of fusion proteins. Purification of hybrid proteins containing the C-LYTA fragment at the amino terminus has been described (see Biotechnology 10:795-798, 1992). Within a preferred embodiment, a repeat portion of LYTA may be incorporated into a fusion polypeptide. A repeat portion is found in the C-terminal region starting at residue 178. A particularly preferred repeat portion incorporates residues 188-305.

[0084] Yet another illustrative embodiment involves fusion polypeptides, and the polynucleotides encoding them, wherein the fusion partner comprises a targeting signal capable of directing a polypeptide to the endosomal/lysosomal compartment, as described in U.S. Pat. No. 5,633,234. An immunogenic polypeptide of the invention, when fused with this targeting signal, will associate more efficiently with MHC class II molecules and thereby provide enhanced in vivo stimulation of CD4⁺ T-cells specific for the polypeptide.

[0085] Polypeptides of the invention are prepared using any of a variety of well known synthetic and/or recombinant techniques, the latter of which are further described below. Polypeptides, portions and other variants generally less than about 150 amino acids can be generated by synthetic means, using techniques well known to those of ordinary skill in the art. In one illustrative example, such polypeptides are synthesized using any of the commercially available solid-phase techniques, such as the Merrifield solid-phase synthesis method, where amino acids are sequentially added to a growing amino acid chain. See Merrifield, J. Am. Chem. Soc. 85:2149-2146, 1963. Equipment for automated synthesis of polypeptides is commercially available from suppliers such as Perkin Elmer/Applied BioSystems Division (Foster City, Calif.), and may be operated according to the manufacturer's instructions.

[0086] In general, polypeptide compositions (including fusion polypeptides) of the invention are isolated. An “isolated” polypeptide is one that is removed from its original environment. For example, a naturally-occurring protein or polypeptide is isolated if it is separated from some or all of the coexisting materials in the natural system. Preferably, such polypeptides are also purified, e.g., are at least about 90% pure, more preferably at least about 95% pure and most preferably at least about 99% pure.

### POLYNUCLEOTIDE COMPOSITIONS

[0087] The present invention, in other aspects, provides polynucleotide compositions. The terms “DNA” and “polynucleotide” are used essentially interchangeably herein to refer to a DNA molecule that has been isolated free of total genomic DNA of a particular species. “Isolated,” as used herein, means that a polynucleotide is substantially away from other coding sequences, and that the DNA molecule does not contain large portions of unrelated coding DNA, such as large chromosomal fragments or other functional genes or polypeptide coding regions. Of course, this refers to the DNA molecule as originally isolated, and does not exclude genes or coding regions later added to the segment by the hand of man.

[0088] As will be understood by those skilled in the art, the polynucleotide compositions of this invention can include genomic sequences, extra-genomic and plasmid-encoded sequences and smaller engineered gene segments that express, or may be adapted to express, proteins, polypeptides, peptides and the like. Such segments may be naturally isolated, or modified synthetically by the hand of man.

[0089] As will be also recognized by the skilled artisan, polynucleotides of the invention may be single-stranded (coding or antisense) or double-stranded, and may be DNA (genomic, cDNA or synthetic) or RNA molecules. RNA molecules may include HnRNA molecules, which contain introns and correspond to a DNA molecule in a one-to-one manner, and mRNA molecules, which do not contain introns. Additional coding or non-coding sequences may, but need not, be present within a polynucleotide of the present invention, and a polynucleotide may, but need not, be linked to other molecules and/or support materials.

[0090] Polynucleotides may comprise a native sequence (i.e., an endogenous sequence that encodes a polypeptide/protein of the invention or a portion thereof) or may comprise a sequence that encodes a variant or derivative, preferably and immunogenic variant or derivative, of such a sequence.

[0091] Therefore, according to another aspect of the present invention, polynucleotide compositions are provided that comprise some or all of a polynucleotide sequence set forth in any one of SEQ ID NO:1-2234, complements of a polynucleotide sequence set forth in any one of SEQ ID NO:1-2234, and degenerate variants of a polynucleotide sequence set forth in any one of SEQ ID NO:1-2234. In certain preferred embodiments, the polynucleotide sequences set forth herein encode immunogenic polypeptides, as described above.

[0092] In other related embodiments, the present invention provides polynucleotide variants having substantial identity to the sequences disclosed herein in SEQ ID NO:1-2234, for example those comprising at least 70% sequence identity, preferably at least 75%, 80%, 85%, 90%, 95%, 96%, 97%, 98%, or 99% or higher, sequence identity compared to a polynucleotide sequence of this invention using the methods described herein, (e.g., BLAST analysis using standard parameters, as described below). One skilled in this art will recognize that these values can be appropriately adjusted to determine corresponding identity of proteins encoded by two nucleotide sequences by taking into account codon degeneracy, amino acid similarity, reading frame positioning and the like.

[0093] Typically, polynucleotide variants will contain one or more substitutions, additions, deletions and/or insertions, preferably such that the immunogenicity of the polypeptide encoded by the variant polynucleotide is not substantially diminished relative to a polypeptide encoded by a polynucleotide sequence specifically set forth herein). The term “variants” should also be understood to encompasses homologous genes of xenogeneic origin.

[0094] In additional embodiments, the present invention provides polynucleotide fragments comprising or consisting of various lengths of contiguous stretches of sequence identical to or complementary to one or more of the sequences disclosed herein. For example, polynucleotides are provided by this invention that comprise or consist of at least about 10, 15, 20, 30, 40, 50, 75, 100, 150, 200, 300, 400, 500 or 1000 or more contiguous nucleotides of one or more of the sequences disclosed herein as well as all intermediate lengths there between. It will be readily understood that “intermediate lengths”, in this context, means any length between the quoted values, such as 16, 17, 18, 19, etc.; 21, 22, 23, etc.; 30, 31, 32, etc.; 50, 51, 52, 53, etc.; 100, 101, 102, 103, etc.; 150, 151, 152, 153, etc.; including all integers through 200-500; 500-1,000, and the like. A polynucleotide sequence as described here may be extended at one or both ends by additional nucleotides not found in the native sequence. This additional sequence may consist of 1, 2, 3, 4, 5, 6, 7, 8, 9, 10, 11, 12, 13, 14, 15, 16, 17, 18, 19, or 20 nucleotides at either end of the disclosed sequence or at both ends of the disclosed sequence.

[0095] In another embodiment of the invention, polynucleotide compositions are provided that are capable of hybridizing under moderate to high stringency conditions to a polynucleotide sequence provided herein, or a fragment thereof, or a complementary sequence thereof. Hybridization techniques are well known in the art of molecular biology. For purposes of illustration, suitable moderately stringent conditions for testing the hybridization of a polynucleotide of this invention with other polynucleotides include prewashing in a solution of 5×SSC, 0.5% SDS, 1.0 mM EDTA (pH 8.0); hybridizing at 50° C.-60° C., 5×SSC, overnight; followed by washing twice at 65° C. for 20 minutes with each of 2×, 0.5× and 0.2×SSC containing 0.1% SDS. One skilled in the art will understand that the stringency of hybridization can be readily manipulated, such as by altering the salt content of the hybridization solution and/or the temperature at which the hybridization is performed. For example, in another embodiment, suitable highly stringent hybridization conditions include those described above, with the exception that the temperature of hybridization is increased, e.g., to 60-65° C. or 65-70° C.

[0096] In certain preferred embodiments, the polynucleotides described above, e.g., polynucleotide variants, fragments and hybridizing sequences, encode polypeptides that are immunologically cross-reactive with a polypeptide sequence specifically set forth herein. In other preferred embodiments, such polynucleotides encode polypeptides that have a level of immunogenic activity of at least about 50%, preferably at least about 70%, and more preferably at least about 90% of that for a polypeptide sequence specifically set forth herein.

[0097] The polynucleotides of the present invention, or fragments thereof, regardless of the length of the coding sequence itself, may be combined with other DNA sequences, such as promoters, polyadenylation signals, additional restriction enzyme sites, multiple cloning sites, other coding segments, and the like, such that their overall length may vary considerably. It is therefore contemplated that a nucleic acid fragment of almost any length may be employed, with the total length preferably being limited by the ease of preparation and use in the intended recombinant DNA protocol. For example, illustrative polynucleotide segments with total lengths of about 10,000, about 5000, about 3000, about 2,000, about 1,000, about 500, about 200, about 100, about 50 base pairs in length, and the like, (including all intermediate lengths) are contemplated to be useful in many implementations of this invention.

[0098] When comparing polynucleotide sequences, two sequences are said to be “identical” if the sequence of nucleotides in the two sequences is the same when aligned for maximum correspondence, as described below. Comparisons between two sequences are typically performed by comparing the sequences over a comparison window to identify and compare local regions of sequence similarity. A “comparison window” as used herein, refers to a segment of at least about 20 contiguous positions, usually 30 to about 75, 40 to about 50, in which a sequence may be compared to a reference sequence of the same number of contiguous positions after the two sequences are optimally aligned.

[0099] Optimal alignment of sequences for comparison may be conducted using the Megalign program in the Lasergene suite of bioinformatics software (DNASTAR, Inc., Madison, Wis.), using default parameters. This program embodies several alignment schemes described in the following references: Dayhoff, M. O. (1978) A model of evolutionary change in proteins—Matrices for detecting distant relationships. In Dayhoff, M. O. (ed.) Atlas of Protein Sequence and Structure, National Biomedical Research Foundation, Washington D.C. Vol. 5, Suppl. 3, pp. 345-358; Hein J. (1990) Unified Approach to Alignment and Phylogenes pp. 626-645 Methods in Enzymology vol. 183, Academic Press, Inc., San Diego, Calif.; Higgins, D. G. and Sharp, P. M. (1989) CABIOS 5:151-153; Myers, E. W. and Muller W. (1988) CABIOS 4:11-17; Robinson, E. D. (1971) Comb. Theor 11:105; Santou, N. Nes, M. (1987) Mol. Biol. Evol. 4:406-425; Sneath, P. H. A. and Sokal, R. R. (1973) Numerical Taxonomy—the Principles and Practice of Numerical Taxonomy, Freeman Press, San Francisco, Calif.; Wilbur, W. J. and Lipman, D. J. (1983) Proc. Natl. Acad., Sci. USA 80:726-730.

[0100] Alternatively, optimal alignment of sequences for comparison may be conducted by the local identity algorithm of Smith and Waterman (1981) Add. APL. Math 2:482, by the identity alignment algorithm of Needleman and Wunsch (1970) J. Mol. Biol. 48:443, by the search for similarity methods of Pearson and Lipman (1988) Proc. Natl. Acad. Sci. USA 85: 2444, by computerized implementations of these algorithms (GAP, BESTFIT, BLAST, FASTA, and TFASTA in the Wisconsin Genetics Software Package, Genetics Computer Group (GCG), 575 Science Dr., Madison, Wis.), or by inspection.

[0101] One preferred example of algorithms that are suitable for determining percent sequence identity and sequence similarity are the BLAST and BLAST 2.0 algorithms, which are described in Altschul et al. (1977) Nucl. Acids Res. 25:3389-3402 and Altschul et al. (1990) J. Mol. Biol. 215:403-410, respectively. BLAST and BLAST 2.0 can be used, for example with the parameters described herein, to determine percent sequence identity for the polynucleotides of the invention. Software for performing BLAST analyses is publicly available through the National Center for Biotechnology Information. In one illustrative example, cumulative scores can be calculated using, for nucleotide sequences, the parameters M (reward score for a pair of matching residues; always >0) and N (penalty score for mismatching residues; always <0). Extension of the word hits in each direction are halted when: the cumulative alignment score falls off by the quantity X from its maximum achieved value; the cumulative score goes to zero or below, due to the accumulation of one or more negative-scoring residue alignments; or the end of either sequence is reached. The BLAST algorithm parameters W, T and X determine the sensitivity and speed of the alignment. The BLASTN program (for nucleotide sequences) uses as defaults a wordlength (W) of 11, and expectation (E) of 10, and the BLOSUM62 scoring matrix (see Henikoff and Henikoff (1989) Proc. Natl. Acad. Sci. USA 89:10915) alignments, (B) of 50, expectation (E) of 10, M=5, N=−4 and a comparison of both strands.

[0102] Preferably, the “percentage of sequence identity” is determined by comparing two optimally aligned sequences over a window of comparison of at least 20 positions, wherein the portion of the polynucleotide sequence in the comparison window may comprise additions or deletions (i.e., gaps) of 20 percent or less, usually 5 to 15 percent, or 10 to 12 percent, as compared to the reference sequences (which does not comprise additions or deletions) for optimal alignment of the two sequences. The percentage is calculated by determining the number of positions at which the identical nucleic acid bases occurs in both sequences to yield the number of matched positions, dividing the number of matched positions by the total number of positions in the reference sequence (i.e., the window size) and multiplying the results by 100 to yield the percentage of sequence identity.

[0103] It will be appreciated by those of ordinary skill in the art that, as a result of the degeneracy of the genetic code, there are many nucleotide sequences that encode a polypeptide as described herein. Some of these polynucleotides bear minimal homology to the nucleotide sequence of any native gene. Nonetheless, polynucleotides that vary due to differences in codon usage are specifically contemplated by the present invention. Further, alleles of the genes comprising the polynucleotide sequences provided herein are within the scope of the present invention. Alleles are endogenous genes that are altered as a result of one or more mutations, such as deletions, additions and/or substitutions of nucleotides. The resulting mRNA and protein may, but need not, have an altered structure or function. Alleles may be identified using standard techniques (such as hybridization, amplification and/or database sequence comparison).

[0104] Therefore, in another embodiment of the invention, a mutagenesis approach, such as site-specific mutagenesis, is employed for the preparation of immunogenic variants and/or derivatives of the polypeptides described herein. By this approach, specific modifications in a polypeptide sequence can be made through mutagenesis of the underlying polynucleotides that encode them. These techniques provides a straightforward approach to prepare and test sequence variants, for example, incorporating one or more of the foregoing considerations, by introducing one or more nucleotide sequence changes into the polynucleotide.

[0105] Site-specific mutagenesis allows the production of mutants through the use of specific oligonucleotide sequences which encode the DNA sequence of the desired mutation, as well as a sufficient number of adjacent nucleotides, to provide a primer sequence of sufficient size and sequence complexity to form a stable duplex on both sides of the deletion junction being traversed. Mutations may be employed in a selected polynucleotide sequence to improve, alter, decrease, modify, or otherwise change the properties of the polynucleotide itself, and/or alter the properties, activity, composition, stability, or primary sequence of the encoded polypeptide.

[0106] In certain embodiments of the present invention, the inventors contemplate the mutagenesis of the disclosed polynucleotide sequences to alter one or more properties of the encoded polypeptide, such as the immunogenicity of a polypeptide vaccine. The techniques of site-specific mutagenesis are well-known in the art, and are widely used to create variants of both polypeptides and polynucleotides. For example, site-specific mutagenesis is often used to alter a specific portion of a DNA molecule. In such embodiments, a primer comprising typically about 14 to about 25 nucleotides or so in length is employed, with about 5 to about 10 residues on both sides of the junction of the sequence being altered.

[0107] As will be appreciated by those of skill in the art, site-specific mutagenesis techniques have often employed a phage vector that exists in both a single stranded and double stranded form. Typical vectors useful in site-directed mutagenesis include vectors such as the M13 phage. These phage are readily commercially-available and their use is generally well-known to those skilled in the art. Double-stranded plasmids are also routinely employed in site directed mutagenesis that eliminates the step of transferring the gene of interest from a plasmid to a phage.

[0108] In general, site-directed mutagenesis in accordance herewith is performed by first obtaining a single-stranded vector or melting apart of two strands of a double-stranded vector that includes within its sequence a DNA sequence that encodes the desired peptide. An oligonucleotide primer bearing the desired mutated sequence is prepared, generally synthetically. This primer is then annealed with the single-stranded vector, and subjected to DNA polymerizing enzymes such as E. coli polymerase I Klenow fragment, in order to complete the synthesis of the mutation-bearing strand. Thus, a heteroduplex is formed wherein one strand encodes the original non-mutated sequence and the second strand bears the desired mutation. This heteroduplex vector is then used to transform appropriate cells, such as E. coli cells, and clones are selected which include recombinant vectors bearing the mutated sequence arrangement.

[0109] The preparation of sequence variants of the selected peptide-encoding DNA segments using site-directed mutagenesis provides a means of producing potentially useful species and is not meant to be limiting as there are other ways in which sequence variants of peptides and the DNA sequences encoding them may be obtained. For example, recombinant vectors encoding the desired peptide sequence may be treated with mutagenic agents, such as hydroxylamine, to obtain sequence variants. Specific details regarding these methods and protocols are found in the teachings of Maloy et al., 1994; Segal, 1976; Prokop and Bajpai, 1991; Kuby, 1994; and Maniatis et al., 1982, each incorporated herein by reference, for that purpose.

[0110] As used herein, the term “oligonucleotide directed mutagenesis procedure” refers to template-dependent processes and vector-mediated propagation which result in an increase in the concentration of a specific nucleic acid molecule relative to its initial concentration, or in an increase in the concentration of a detectable signal, such as amplification. As used herein, the term “oligonucleotide directed mutagenesis procedure” is intended to refer to a process that involves the template-dependent extension of a primer molecule. The term template dependent process refers to nucleic acid synthesis of an RNA or a DNA molecule wherein the sequence of the newly synthesized strand of nucleic acid is dictated by the well-known rules of complementary base pairing (see, for example, Watson, 1987). Typically, vector mediated methodologies involve the introduction of the nucleic acid fragment into a DNA or RNA vector, the clonal amplification of the vector, and the recovery of the amplified nucleic acid fragment. Examples of such methodologies are provided by U.S. Pat. No. 4,237,224, specifically incorporated herein by reference in its entirety.

[0111] In another approach for the production of polypeptide variants of the present invention, recursive sequence recombination, as described in U.S. Pat. No. 5,837,458, may be employed. In this approach, iterative cycles of recombination and screening or selection are performed to “evolve” individual polynucleotide variants of the invention having, for example, enhanced immunogenic activity.

[0112] In other embodiments of the present invention, the polynucleotide sequences provided herein can be advantageously used as probes or primers for nucleic acid hybridization. As such, it is contemplated that nucleic acid segments that comprise or consist of a sequence region of at least about a 15 nucleotide long contiguous sequence that has the same sequence as, or is complementary to, a 15 nucleotide long contiguous sequence disclosed herein will find particular utility. Longer contiguous identical or complementary sequences, e.g., those of about 20, 30, 40, 50, 100, 200, 500, 1000 (including all intermediate lengths) and even up to full length sequences will also be of use in certain embodiments.

[0113] The ability of such nucleic acid probes to specifically hybridize to a sequence of interest will enable them to be of use in detecting the presence of complementary sequences in a given sample. However, other uses are also envisioned, such as the use of the sequence information for the preparation of mutant species primers, or primers for use in preparing other genetic constructions.

[0114] Polynucleotide molecules having sequence regions consisting of contiguous nucleotide stretches of 10-14, 15-20, 30, 50, or even of 100-200 nucleotides or so (including intermediate lengths as well), identical or complementary to a polynucleotide sequence disclosed herein, are particularly contemplated as hybridization probes for use in, e.g., Southern and Northern blotting. This would allow a gene product, or fragment thereof, to be analyzed, both in diverse cell types and also in various bacterial cells. The total size of fragment, as well as the size of the complementary stretch(es), will ultimately depend on the intended use or application of the particular nucleic acid segment. Smaller fragments will generally find use in hybridization embodiments, wherein the length of the contiguous complementary region may be varied, such as between about 15 and about 100 nucleotides, but larger contiguous complementarity stretches may be used, according to the length complementary sequences one wishes to detect.

[0115] The use of a hybridization probe of about 15-25 nucleotides in length allows the formation of a duplex molecule that is both stable and selective. Molecules having contiguous complementary sequences over stretches greater than 15 bases in length are generally preferred, though, in order to increase stability and selectivity of the hybrid, and thereby improve the quality and degree of specific hybrid molecules obtained. One will generally prefer to design nucleic acid molecules having gene-complementary stretches of 15 to 25 contiguous nucleotides, or even longer where desired.

[0116] Hybridization probes may be selected from any portion of any of the sequences disclosed herein. All that is required is to review the sequences set forth herein, or to any continuous portion of the sequences, from about 15-25 nucleotides in length up to and including the full length sequence, that one wishes to utilize as a probe or primer. The choice of probe and primer sequences may be governed by various factors. For example, one may wish to employ primers from towards the termini of the total sequence.

[0117] Small polynucleotide segments or fragments may be readily prepared by, for example, directly synthesizing the fragment by chemical means, as is commonly practiced using an automated oligonucleotide synthesizer. Also, fragments may be obtained by application of nucleic acid reproduction technology, such as the PCR™ technology of U.S. Pat. No. 4,683,202 (incorporated herein by reference), by introducing selected sequences into recombinant vectors for recombinant production, and by other recombinant DNA techniques generally known to those of skill in the art of molecular biology.

[0118] The nucleotide sequences of the invention may be used for their ability to selectively form duplex molecules with complementary stretches of the entire gene or gene fragments of interest. Depending on the application envisioned, one will typically desire to employ varying conditions of hybridization to achieve varying degrees of selectivity of probe towards target sequence. For applications requiring high selectivity, one will typically desire to employ relatively stringent conditions to form the hybrids, e.g., one will select relatively low salt and/or high temperature conditions, such as provided by a salt concentration of from about 0.02 M to about 0.15 M salt at temperatures of from about 50° C. to about 70° C. Such selective conditions tolerate little, if any, mismatch between the probe and the template or target strand, and would be particularly suitable for isolating related sequences.

[0119] Of course, for some applications, for example, where one desires to prepare mutants employing a mutant primer strand hybridized to an underlying template, less stringent (reduced stringency) hybridization conditions will typically be needed in order to allow formation of the heteroduplex. In these circumstances, one may desire to employ salt conditions such as those of from about 0.15 M to about 0.9 M salt, at temperatures ranging from about 20° C. to about 55° C. Cross-hybridizing species can thereby be readily identified as positively hybridizing signals with respect to control hybridizations. In any case, it is generally appreciated that conditions can be rendered more stringent by the addition of increasing amounts of formamide, which serves to destabilize the hybrid duplex in the same manner as increased temperature. Thus, hybridization conditions can be readily manipulated, and thus will generally be a method of choice depending on the desired results.

[0120] According to another embodiment of the present invention, polynucleotide compositions comprising antisense oligonucleotides are provided. Antisense oligonucleotides have been demonstrated to be effective and targeted inhibitors of protein synthesis, and, consequently, provide a therapeutic approach by which a disease can be treated by inhibiting the synthesis of proteins that contribute to the disease. The efficacy of antisense oligonucleotides for inhibiting protein synthesis is well established. For example, the synthesis of polygalactauronase and the muscarine type 2 acetylcholine receptor are inhibited by antisense oligonucleotides directed to their respective mRNA sequences (U.S. Pat. No. 5,739,119 and U.S. Pat. No. 5,759,829). Further, examples of antisense inhibition have been demonstrated with the nuclear protein cyclin, the multiple drug resistance gene (MDG1), ICAM-1, E-selectin, STK-1, striatal GABA_{A} receptor and human EGF (Jaskulski et al., Science. June 1988 10;240(4858):1544-6; Vasanthakumar and Ahmed, Cancer Commun. 1989;1(4):225-32; Peris et al., Brain Res Mol Brain Res. June 1998 15;57(2):310-20; U.S. Pat. No. 5,801,154; U.S. Pat. No. 5,789,573; U.S. Pat. No. 5,718,709 and U.S. Pat. No. 5,610,288). Antisense constructs have also been described that inhibit and can be used to treat a variety of abnormal cellular proliferations, e.g. cancer (U.S. Pat. No. 5,747,470; U.S. Pat. No. 5,591,317 and U.S. Pat. No. 5,783,683).

[0121] Therefore, in certain embodiments, the present invention provides oligonucleotide sequences that comprise all, or a portion of, any sequence that is capable of specifically binding to polynucleotide sequence described herein, or a complement thereof. In one embodiment, the antisense oligonucleotides comprise DNA or derivatives thereof. In another embodiment, the oligonucleotides comprise RNA or derivatives thereof. In a third embodiment, the oligonucleotides are modified DNAs comprising a phosphorothioated modified backbone. In a fourth embodiment, the oligonucleotide sequences comprise peptide nucleic acids or derivatives thereof. In each case, preferred compositions comprise a sequence region that is complementary, and more preferably substantially-complementary, and even more preferably, completely complementary to one or more portions of polynucleotides disclosed herein. Selection of antisense compositions specific for a given gene sequence is based upon analysis of the chosen target sequence and determination of secondary structure, Tₘ, binding energy, and relative stability. Antisense compositions may be selected based upon their relative inability to form dimers, hairpins, or other secondary structures that would reduce or prohibit specific binding to the target mRNA in a host cell. Highly preferred target regions of the mRNA, are those which are at or near the AUG translation initiation codon, and those sequences which are substantially complementary to 5′ regions of the mRNA. These secondary structure analyses and target site selection considerations can be performed, for example, using v.4 of the OLIGO primer analysis software and/or the BLASTN 2.0.5 algorithm software (Altschul et al., Nucleic Acids Res. 1997, 25(17):3389-402).

[0122] The use of an antisense delivery method employing a short peptide vector, termed MPG (27 residues), is also contemplated. The MPG peptide contains a hydrophobic domain derived from the fusion sequence of HIV gp41and a hydrophilic domain from the nuclear localization sequence of SV40 T-antigen (Morris et al., Nucleic Acids Res. July 1997 15;25(14):2730-6). It has been demonstrated that several molecules of the MPG peptide coat the antisense oligonucleotides and can be delivered into cultured mammalian cells in less than 1 hour with relatively high efficiency (90%). Further, the interaction with MPG strongly increases both the stability of the oligonucleotide to nuclease and the ability to cross the plasma membrane.

[0123] According to another embodiment of the invention, the polynucleotide compositions described herein are used in the design and preparation of ribozyme molecules for inhibiting expression of the tumor polypeptides and proteins of the present invention in tumor cells. Ribozymes are RNA-protein complexes that cleave nucleic acids in a site-specific fashion. Ribozymes have specific catalytic domains that possess endonuclease activity (Kim and Cech, Proc Natl Acad Sci USA. December 1987;84(24):8788-92; Forster and Symons, Cell. April 1987 24;49(2):211-20). For example, a large number of ribozymes accelerate phosphoester transfer reactions with a high degree of specificity, often cleaving only one of several phosphoesters in an oligonucleotide substrate (Cech et al., Cell. December 1981;27(3 Pt 2):487-96; Michel and Westhof, J Mol Biol. December 1990 5;216(3):585-610; Reinhold-Hurek and Shub, Nature. May 1992 14;357(6374):173-6). This specificity has been attributed to the requirement that the substrate bind via specific base-pairing interactions to the internal guide sequence (“IGS”) of the ribozyme prior to chemical reaction.

[0124] Six basic varieties of naturally-occurring enzymatic RNAs are known presently. Each can catalyze the hydrolysis of RNA phosphodiester bonds in trans (and thus can cleave other RNA molecules) under physiological conditions. In general, enzymatic nucleic acids act by first binding to a target RNA. Such binding occurs through the target binding portion of a enzymatic nucleic acid which is held in close proximity to an enzymatic portion of the molecule that acts to cleave the target RNA. Thus, the enzymatic nucleic acid first recognizes and then binds a target RNA through complementary base-pairing, and once bound to the correct site, acts enzymatically to cut the target RNA. Strategic cleavage of such a target RNA will destroy its ability to direct synthesis of an encoded protein. After an enzymatic nucleic acid has bound and cleaved its RNA target, it is released from that RNA to search for another target and can repeatedly bind and cleave new targets.

[0125] The enzymatic nature of a ribozyme is advantageous over many technologies, such as antisense technology (where a nucleic acid molecule simply binds to a nucleic acid target to block its translation) since the concentration of ribozyme necessary to affect a therapeutic treatment is lower than that of an antisense oligonucleotide. This advantage reflects the ability of the ribozyme to act enzymatically. Thus, a single ribozyme molecule is able to cleave many molecules of target RNA. In addition, the ribozyme is a highly specific inhibitor, with the specificity of inhibition depending not only on the base pairing mechanism of binding to the target RNA, but also on the mechanism of target RNA cleavage. Single mismatches, or base-substitutions, near the site of cleavage can completely eliminate catalytic activity of a ribozyme. Similar mismatches in antisense molecules do not prevent their action (Woolf et al., Proc Natl Acad Sci USA. August 1992 15;89(16):7305-9). Thus, the specificity of action of a ribozyme is greater than that of an antisense oligonucleotide binding the same RNA site.

[0126] The enzymatic nucleic acid molecule may be formed in a hammerhead, hairpin, a hepatitis δ virus, group I intron or RNaseP RNA (in association with an RNA guide sequence) or Neurospora VS RNA motif. Examples of hammerhead motifs are described by Rossi et al. Nucleic Acids Res. September 1992 11;20(17):4559-65. Examples of hairpin motifs are described by Hampel et al. (Eur. Pat. Appl. Publ. No. EP 0360257), Hampel and Tritz, Biochemistry June 1989 13;28(12):4929-33; Hampel et al., Nucleic Acids Res. January 1990 25;18(2):299-304 and U.S. Pat. No. 5,631,359. An example of the hepatitis δ virus motif is described by Perrotta and Been, Biochemistry. December 1992 1;31(47):11843-52; an example of the RNaseP motif is described by Guerrier-Takada et al., Cell. December 1983;35(3 Pt 2):849-57; Neurospora VS RNA ribozyme motif is described by Collins (Saville and Collins, Cell. May 1990 18;61(4):685-96; Saville and Collins, Proc Natl Acad Sci USA. October 1991 1;88(19):8826-30; Collins and Olive, Biochemistry. March 1998 23;32(11):2795-9); and an example of the Group I intron is described in (U.S. Pat. No. 4,987,071). All that is important in an enzymatic nucleic acid molecule of this invention is that it has a specific substrate binding site which is complementary to one or more of the target gene RNA regions, and that it have nucleotide sequences within or surrounding that substrate binding site which impart an RNA cleaving activity to the molecule. Thus the ribozyme constructs need not be limited to specific motifs mentioned herein.

[0127] Ribozymes may be designed as described in Int. Pat. Appl. Publ. No. WO 93/23569 and Int. Pat. Appl. Publ. No. WO 94/02595, each specifically incorporated herein by reference) and synthesized to be tested in vitro and in vivo, as described. Such ribozymes can also be optimized for delivery. While specific examples are provided, those in the art will recognize that equivalent RNA targets in other species can be utilized when necessary.

[0128] Ribozyme activity can be optimized by altering the length of the ribozyme binding arms, or chemically synthesizing ribozymes with modifications that prevent their degradation by serum ribonucleases (see e.g., Int. Pat. Appl. Publ. No. WO 92/07065; Int. Pat. Appl. Publ. No. WO 93/15187; Int. Pat. Appl. Publ. No. WO 91/03162; Eur. Pat. Appl. Publ. No. 92110298.4; U.S. Pat. No. 5,334,711; and Int. Pat. Appl. Publ. No. WO 94/13688, which describe various chemical modifications that can be made to the sugar moieties of enzymatic RNA molecules), modifications which enhance their efficacy in cells, and removal of stem II bases to shorten RNA synthesis times and reduce chemical requirements.

[0129] Sullivan et al. (Int. Pat. Appl. Publ. No. WO 94/02595) describes the general methods for delivery of enzymatic RNA molecules. Ribozymes may be administered to cells by a variety of methods known to those familiar to the art, including, but not restricted to, encapsulation in liposomes, by iontophoresis, or by incorporation into other vehicles, such as hydrogels, cyclodextrins, biodegradable nanocapsules, and bioadhesive microspheres. For some indications, ribozymes may be directly delivered ex vivo to cells or tissues with or without the aforementioned vehicles. Alternatively, the RNA/vehicle combination may be locally delivered by direct inhalation, by direct injection or by use of a catheter, infusion pump or stent. Other routes of delivery include, but are not limited to, intravascular, intramuscular, subcutaneous or joint injection, aerosol inhalation, oral (tablet or pill form), topical, systemic, ocular, intraperitoneal and/or intrathecal delivery. More detailed descriptions of ribozyme delivery and administration are provided in Int. Pat. Appl. Publ. No. WO 94/02595 and Int. Pat. Appl. Publ. No. WO 93/23569, each specifically incorporated herein by reference.

[0130] Another means of accumulating high concentrations of a ribozyme(s) within cells is to incorporate the ribozyme-encoding sequences into a DNA expression vector. Transcription of the ribozyme sequences are driven from a promoter for eukaryotic RNA polymerase I (pol I), RNA polymerase II (pol II), or RNA polymerase III (pol III). Transcripts from pol II or pol III promoters will be expressed at high levels in all cells; the levels of a given pol II promoter in a given cell type will depend on the nature of the gene regulatory sequences (enhancers, silencers, etc.) present nearby. Prokaryotic RNA polymerase promoters may also be used, providing that the prokaryotic RNA polymerase enzyme is expressed in the appropriate cells Ribozymes expressed from such promoters have been shown to function in mammalian cells. Such transcription units can be incorporated into a variety of vectors for introduction into mammalian cells, including but not restricted to, plasmid DNA vectors, viral DNA vectors (such as adenovirus or adeno-associated vectors), or viral RNA vectors (such as retroviral, semliki forest virus, sindbis virus vectors).

[0131] In another embodiment of the invention, peptide nucleic acids (PNAs) compositions are provided. PNA is a DNA mimic in which the nucleobases are attached to a pseudopeptide backbone (Good and Nielsen, Antisense Nucleic Acid Drug Dev. 1997 7(4) 431-37). PNA is able to be utilized in a number methods that traditionally have used RNA or DNA. Often PNA sequences perform better in techniques than the corresponding RNA or DNA sequences and have utilities that are not inherent to RNA or DNA. A review of PNA including methods of making, characteristics of, and methods of using, is provided by Corey (Trends Biotechnol June 1997;15(6):224-9). As such, in certain embodiments, one may prepare PNA sequences that are complementary to one or more portions of the ACE mRNA sequence, and such PNA compositions may be used to regulate, alter, decrease, or reduce the translation of ACE-specific mRNA, and thereby alter the level of ACE activity in a host cell to which such PNA compositions have been administered.

[0132] PNAs have 2-aminoethyl-glycine linkages replacing the normal phosphodiester backbone of DNA (Nielsen et al., Science December 1991 6;254(5037):1497-500; Hanvey et al., Science. November 1992 27;258(5087):1481-5; Hyrup and Nielsen, Bioorg Med Chem. January 1996;4(1):5-23). This chemistry has three important consequences: firstly, in contrast to DNA or phosphorothioate oligonucleotides, PNAs are neutral molecules; secondly, PNAs are achiral, which avoids the need to develop a stereoselective synthesis; and thirdly, PNA synthesis uses standard Boc or Fmoc protocols for solid-phase peptide synthesis, although other methods, including a modified Merrifield method, have been used.

[0133] PNA monomers or ready-made oligomers are commercially available from PerSeptive Biosystems (Framingham, Mass.). PNA syntheses by either Boc or Fmoc protocols are straightforward using manual or automated protocols (Norton et al., Bioorg Med Chem. April 1995;3(4):437-45). The manual protocol lends itself to the production of chemically modified PNAs or the simultaneous synthesis of families of closely related PNAs.

[0134] As with peptide synthesis, the success of a particular PNA synthesis will depend on the properties of the chosen sequence. For example, while in theory PNAs can incorporate any combination of nucleotide bases, the presence of adjacent purines can lead to deletions of one or more residues in the product. In expectation of this difficulty, it is suggested that, in producing PNAs with adjacent purines, one should repeat the coupling of residues likely to be added inefficiently. This should be followed by the purification of PNAs by reverse-phase high-pressure liquid chromatography, providing yields and purity of product similar to those observed during the synthesis of peptides.

[0135] Modifications of PNAs for a given application may be accomplished by coupling amino acids during solid-phase synthesis or by attaching compounds that contain a carboxylic acid group to the exposed N-terminal amine. Alternatively, PNAs can be modified after synthesis by coupling to an introduced lysine or cysteine. The ease with which PNAs can be modified facilitates optimization for better solubility or for specific functional requirements. Once synthesized, the identity of PNAs and their derivatives can be confirmed by mass spectrometry. Several studies have made and utilized modifications of PNAs (for example, Norton et al., Bioorg Med Chem. April 1995;3(4):437-45; Petersen et al., J Pept Sci. May-June 1995;1(3):175-83; Orum et al., Biotechniques. September 1995;19(3):472-80; Footer et al., Biochemistry. August 1996 20;35(33):10673-9; Griffith et al., Nucleic Acids Res. August 1995 11;23(15):3003-8; Pardridge et al., Proc Natl Acad Sci USA. June 1995 6;92(12):5592-6; Boffa et al, Proc Natl Acad Sci USA. March 1995 14;92(6):1901-5; Gambacorti-Passerini et al., Blood. August 1996 15;88(4):1411-7; Armitage et al., Proc Natl Acad Sci USA. November 1997 11;94(23):12320-5; Seeger et al., Biotechniques. 1997 Sep;23(3):512-7). U.S. Patent No. 5,700,922 discusses PNA-DNA-PNA chimeric molecules and their uses in diagnostics, modulating protein in organisms, and treatment of conditions susceptible to therapeutics.

[0136] Methods of characterizing the antisense binding properties of PNAs are discussed in Rose (Anal Chem. December 1993 15;65(24):3545-9) and Jensen et al. (Biochemistry. April 1997 22;36(16):5072-7). Rose uses capillary gel electrophoresis to determine binding of PNAs to their complementary oligonucleotide, measuring the relative binding kinetics and stoichiometry. Similar types of measurements were made by Jensen et al. using BIAcore™ technology.

[0137] Other applications of PNAs that have been described and will be apparent to the skilled artisan include use in DNA strand invasion, antisense inhibition, mutational analysis, enhancers of transcription, nucleic acid purification, isolation of transcriptionally active genes, blocking of transcription factor binding, genome cleavage, biosensors, in situ hybridization, and the like.

[0138] POLYNUCLEOTIDE IDENTIFICATION, CHARACTERIZATION AND EXPRESSION

[0139] Polynucleotides compositions of the present invention may be identified, prepared and/or manipulated using any of a variety of well established techniques (see generally, Sambrook et al., Molecular Cloning: A Laboratory Manual, Cold Spring Harbor Laboratories, Cold Spring Harbor, N.Y., 1989, and other like references). For example, a polynucleotide may be identified, as described in more detail below, by screening a microarray of cDNAs for tumor-associated expression (i.e., expression that is at least two fold greater in a tumor than in normal tissue, as determined using a representative assay provided herein). Such screens may be performed, for example, using the microarray technology of Affymetrix, Inc. (Santa Clara, Calif.) according to the manufacturer's instructions (and essentially as described by Schena et al., Proc. Natl. Acad. Sci. USA 93:10614-10619, 1996 and Heller et al., Proc. Natl. Acad. Sci. USA 94:2150-2155, 1997). Alternatively, polynucleotides may be amplified from cDNA prepared from cells expressing the proteins described herein, such as tumor cells.

[0140] Many template dependent processes are available to amplify a target sequences of interest present in a sample. One of the best known amplification methods is the polymerase chain reaction (PCR™) which is described in detail in U.S. Pat. Nos. 4,683,195, 4,683,202 and 4,800,159, each of which is incorporated herein by reference in its entirety. Briefly, in PCR™ two primer sequences are prepared which are complementary to regions on opposite complementary strands of the target sequence. An excess of deoxynucleoside triphosphates is added to a reaction mixture along with a DNA polymerase (e.g., Taq polymerase). If the target sequence is present in a sample, the primers will bind to the target and the polymerase will cause the primers to be extended along the target sequence by adding on nucleotides. By raising and lowering the temperature of the reaction mixture, the extended primers will dissociate from the target to form reaction products, excess primers will bind to the target and to the reaction product and the process is repeated. Preferably reverse transcription and PCR™ amplification procedure may be performed in order to quantify the amount of mRNA amplified. Polymerase chain reaction methodologies are well known in the art.

[0141] Any of a number of other template dependent processes, many of which are variations of the PCR™ amplification technique, are readily known and available in the art. Illustratively, some such methods include the ligase chain reaction (referred to as LCR), described, for example, in Eur. Pat. Appl. Publ. No. 320,308 and U.S. Pat. No. 4,883,750; Qbeta Replicase, described in PCT Intl. Pat. Appl. Publ. No. PCT/US87/00880; Strand Displacement Amplification (SDA) and Repair Chain Reaction (RCR). Still other amplification methods are described in Great Britain Pat. Appl. No. 2 202 328, and in PCT Intl. Pat. Appl. Publ. No. PCT/US89/01025. Other nucleic acid amplification procedures include transcription-based amplification systems (TAS) (PCT Intl. Pat. Appl. Publ. No. WO 88/10315), including nucleic acid sequence based amplification (NASBA) and 3SR. Eur. Pat. Appl. Publ. No. 329,822 describes a nucleic acid amplification process involving cyclically synthesizing single-stranded RNA (“ssRNA”), ssDNA, and double-stranded DNA (dsDNA). PCT Intl. Pat. Appl. Publ. No. WO 89/06700 describes a nucleic acid sequence amplification scheme based on the hybridization of a promoter/primer sequence to a target single-stranded DNA (“ssDNA”) followed by transcription of many RNA copies of the sequence. Other amplification methods such as “RACE” (Frohman, 1990), and “one-sided PCR” (Ohara, 1989) are also well-known to those of skill in the art.

[0142] An amplified portion of a polynucleotide of the present invention may be used to isolate a full length gene from a suitable library (e.g., a tumor cDNA library) using well known techniques. Within such techniques, a library (cDNA or genomic) is screened using one or more polynucleotide probes or primers suitable for amplification. Preferably, a library is size-selected to include larger molecules. Random primed libraries may also be preferred for identifying 5′ and upstream regions of genes. Genomic libraries are preferred for obtaining introns and extending 5′ sequences.

[0143] For hybridization techniques, a partial sequence may be labeled (e.g., by nick-translation or end-labeling with ³²P) using well-known techniques. A bacterial or bacteriophage library is then generally screened by hybridizing filters containing denatured bacterial colonies (or lawns containing phage plaques) with the labeled probe (see Sambrook et al., Molecular Cloning: A Laboratory Manual, Cold Spring Harbor Laboratories, Cold Spring Harbor, N.Y., 1989). Hybridizing colonies or plaques are selected and expanded, and the DNA is isolated for further analysis. cDNA clones may be analyzed to determine the amount of additional sequence by, for example, PCR using a primer from the partial sequence and a primer from the vector. Restriction maps and partial sequences may be generated to identify one or more overlapping clones. The complete sequence may then be determined using standard techniques, which may involve generating a series of deletion clones. The resulting overlapping sequences can then assembled into a single contiguous sequence. A full length cDNA molecule can be generated by ligating suitable fragments, using well known techniques.

[0144] Alternatively, amplification techniques, such as those described above, can be useful for obtaining a full length coding sequence from a partial cDNA sequence. One such amplification technique is inverse PCR (see Triglia et al., Nucl. Acids Res. 16:8186, 1988), which uses restriction enzymes to generate a fragment in the known region of the gene. The fragment is then circularized by intramolecular ligation and used as a template for PCR with divergent primers derived from the known region. Within an alternative approach, sequences adjacent to a partial sequence may be retrieved by amplification with a primer to a linker sequence and a primer specific to a known region. The amplified sequences are typically subjected to a second round of amplification with the same linker primer and a second primer specific to the known region. A variation on this procedure, which employs two primers that initiate extension in opposite directions from the known sequence, is described in WO 96/38591. Another such technique is known as “rapid amplification of cDNA ends” or RACE. This technique involves the use of an internal primer and an external primer, which hybridizes to a polyA region or vector sequence, to identify sequences that are 5′ and 3′ of a known sequence. Additional techniques include capture PCR (Lagerstrom et al., PCR Methods Applic. 1:111-19, 1991) and walking PCR (Parker et al., Nucl. Acids. Res. 19:3055-60, 1991). Other methods employing amplification may also be employed to obtain a full length cDNA sequence.

[0145] In certain instances, it is possible to obtain a full length cDNA sequence by analysis of sequences provided in an expressed sequence tag (EST) database, such as that available from GenBank. Searches for overlapping ESTs may generally be performed using well known programs (e.g., NCBI BLAST searches), and such ESTs may be used to generate a contiguous full length sequence. Full length DNA sequences may also be obtained by analysis of genomic fragments.

[0146] In other embodiments of the invention, polynucleotide sequences or fragments thereof which encode polypeptides of the invention, or fusion proteins or functional equivalents thereof, may be used in recombinant DNA molecules to direct expression of a polypeptide in appropriate host cells. Due to the inherent degeneracy of the genetic code, other DNA sequences that encode substantially the same or a functionally equivalent amino acid sequence may be produced and these sequences may be used to clone and express a given polypeptide.

[0147] As will be understood by those of skill in the art, it may be advantageous in some instances to produce polypeptide-encoding nucleotide sequences possessing non-naturally occurring codons. For example, codons preferred by a particular prokaryotic or eukaryotic host can be selected to increase the rate of protein expression or to produce a recombinant RNA transcript having desirable properties, such as a half-life which is longer than that of a transcript generated from the naturally occurring sequence.

[0148] Moreover, the polynucleotide sequences of the present invention can be engineered using methods generally known in the art in order to alter polypeptide encoding sequences for a variety of reasons, including but not limited to, alterations which modify the cloning, processing, and/or expression of the gene product. For example, DNA shuffling by random fragmentation and PCR reassembly of gene fragments and synthetic oligonucleotides may be used to engineer the nucleotide sequences. In addition, site-directed mutagenesis may be used to insert new restriction sites, alter glycosylation patterns, change codon preference, produce splice variants, or introduce mutations, and so forth.

[0149] In another embodiment of the invention, natural, modified, or recombinant nucleic acid sequences may be ligated to a heterologous sequence to encode a fusion protein. For example, to screen peptide libraries for inhibitors of polypeptide activity, it may be useful to encode a chimeric protein that can be recognized by a commercially available antibody. A fusion protein may also be engineered to contain a cleavage site located between the polypeptide-encoding sequence and the heterologous protein sequence, so that the polypeptide may be cleaved and purified away from the heterologous moiety.

[0150] Sequences encoding a desired polypeptide may be synthesized, in whole or in part, using chemical methods well known in the art (see Caruthers, M. H. et al. (1980) Nucl. Acids Res. Symp. Ser. 215-223, Horn, T. et al. (1980) Nucl. Acids Res. Symp. Ser. 225-232). Alternatively, the protein itself may be produced using chemical methods to synthesize the amino acid sequence of a polypeptide, or a portion thereof. For example, peptide synthesis can be performed using various solid-phase techniques (Roberge, J. Y. et al. (1995) Science 269:202-204) and automated synthesis may be achieved, for example, using the ABI 431A Peptide Synthesizer (Perkin Elmer, Palo Alto, Calif.).

[0151] A newly synthesized peptide may be substantially purified by preparative high performance liquid chromatography (e.g., Creighton, T. (1983) Proteins, Structures and Molecular Principles, W H Freeman and Co., New York, N.Y.) or other comparable techniques available in the art. The composition of the synthetic peptides may be confirmed by amino acid analysis or sequencing (e.g., the Edman degradation procedure). Additionally, the amino acid sequence of a polypeptide, or any part thereof, may be altered during direct synthesis and/or combined using chemical methods with sequences from other proteins, or any part thereof, to produce a variant polypeptide.

[0152] In order to express a desired polypeptide, the nucleotide sequences encoding the polypeptide, or functional equivalents, may be inserted into appropriate expression vector, i.e., a vector which contains the necessary elements for the transcription and translation of the inserted coding sequence. Methods which are well known to those skilled in the art may be used to construct expression vectors containing sequences encoding a polypeptide of interest and appropriate transcriptional and translational control elements. These methods include in vitro recombinant DNA techniques, synthetic techniques, and in vivo genetic recombination. Such techniques are described, for example, in Sambrook, J. et al. (1989) Molecular Cloning, A Laboratory Manual, Cold Spring Harbor Press, Plainview, N.Y., and Ausubel, F. M. et al. (1989) Current Protocols in Molecular Biology, John Wiley & Sons, New York. N.Y.

[0153] A variety of expression vector/host systems may be utilized to contain and express polynucleotide sequences. These include, but are not limited to, microorganisms such as bacteria transformed with recombinant bacteriophage, plasmid, or cosmid DNA expression vectors; yeast transformed with yeast expression vectors; insect cell systems infected with virus expression vectors (e.g., baculovirus); plant cell systems transformed with virus expression vectors (e.g., cauliflower mosaic virus, CaMV; tobacco mosaic virus, TMV) or with bacterial expression vectors (e.g., Ti or pBR322 plasmids); or animal cell systems.

[0154] The “control elements” or “regulatory sequences” present in an expression vector are those non-translated regions of the vector—enhancers, promoters, 5′ and 3′ untranslated regions—which interact with host cellular proteins to carry out transcription and translation. Such elements may vary in their strength and specificity. Depending on the vector system and host utilized, any number of suitable transcription and translation elements, including constitutive and inducible promoters, may be used. For example, when cloning in bacterial systems, inducible promoters such as the hybrid lacZ promoter of the pBLUESCRIPT phagemid (Stratagene, La Jolla, Calif.) or pSPORT1 plasmid (Gibco BRL, Gaithersburg, Md.) and the like may be used. In mammalian cell systems, promoters from mammalian genes or from mammalian viruses are generally preferred. If it is necessary to generate a cell line that contains multiple copies of the sequence encoding a polypeptide, vectors based on SV40 or EBV may be advantageously used with an appropriate selectable marker.

[0155] In bacterial systems, any of a number of expression vectors may be selected depending upon the use intended for the expressed polypeptide. For example, when large quantities are needed, for example for the induction of antibodies, vectors which direct high level expression of fusion proteins that are readily purified may be used. Such vectors include, but are not limited to, the multifunctional E. coli cloning and expression vectors such as pBLUESCRIPT (Stratagene), in which the sequence encoding the polypeptide of interest may be ligated into the vector in frame with sequences for the amino-terminal Met and the subsequent 7 residues of .beta.-galactosidase so that a hybrid protein is produced; pIN vectors (Van Heeke, G. and S. M. Schuster (1989) J. Biol. Chem. 264:5503-5509); and the like. pGEX Vectors (Promega, Madison, Wis.) may also be used to express foreign polypeptides as fusion proteins with glutathione S-transferase (GST). In general, such fusion proteins are soluble and can easily be purified from lysed cells by adsorption to glutathione-agarose beads followed by elution in the presence of free glutathione. Proteins made in such systems may be designed to include heparin, thrombin, or factor XA protease cleavage sites so that the cloned polypeptide of interest can be released from the GST moiety at will.

[0156] In the yeast, Saccharomyces cerevisiae, a number of vectors containing constitutive or inducible promoters such as alpha factor, alcohol oxidase, and PGH may be used. For reviews, see Ausubel et al. (supra) and Grant et al. (1987) Methods Enzymol. 153:516-544.

[0157] In cases where plant expression vectors are used, the expression of sequences encoding polypeptides may be driven by any of a number of promoters. For example, viral promoters such as the 35S and 19S promoters of CaMV may be used alone or in combination with the omega leader sequence from TMV (Takamatsu, N. (1987) EMBO J. 6:307-311. Alternatively, plant promoters such as the small subunit of RUBISCO or heat shock promoters may be used (Coruzzi, G. et al. (1984) EMBO J. 3:1671-1680; Broglie, R. et al. (1984) Science 224:838-843; and Winter, J. et al. (1991) Results Probl. Cell Differ. 17:85-105). These constructs can be introduced into plant cells by direct DNA transformation or pathogen-mediated transfection. Such techniques are described in a number of generally available reviews (see, for example, Hobbs, S. or Murry, L. E. in McGraw Hill Yearbook of Science and Technology (1992) McGraw Hill, New York, N.Y.; pp. 191-196).

[0158] An insect system may also be used to express a polypeptide of interest. For example, in one such system, Autographa californica nuclear polyhedrosis virus (AcNPV) is used as a vector to express foreign genes in Spodoptera frugiperda cells or in Trichoplusia larvae. The sequences encoding the polypeptide may be cloned into a non-essential region of the virus, such as the polyhedrin gene, and placed under control of the polyhedrin promoter. Successful insertion of the polypeptide-encoding sequence will render the polyhedrin gene inactive and produce recombinant virus lacking coat protein. The recombinant viruses may then be used to infect, for example, S. frugiperda cells or Trichoplusia larvae in which the polypeptide of interest may be expressed (Engelhard, E. K. et al. (1994) Proc. Natl. Acad. Sci. 91 :3224-3227).

[0159] In mammalian host cells, a number of viral-based expression systems are generally available. For example, in cases where an adenovirus is used as an expression vector, sequences encoding a polypeptide of interest may be ligated into an adenovirus transcription/translation complex consisting of the late promoter and tripartite leader sequence. Insertion in a non-essential E1 or E3 region of the viral genome may be used to obtain a viable virus which is capable of expressing the polypeptide in infected host cells (Logan, J. and Shenk, T. (1984) Proc. Natl. Acad. Sci. 81:3655-3659). In addition, transcription enhancers, such as the Rous sarcoma virus (RSV) enhancer, may be used to increase expression in mammalian host cells.

[0160] Specific initiation signals may also be used to achieve more efficient translation of sequences encoding a polypeptide of interest. Such signals include the ATG initiation codon and adjacent sequences. In cases where sequences encoding the polypeptide, its initiation codon, and upstream sequences are inserted into the appropriate expression vector, no additional transcriptional or translational control signals may be needed. However, in cases where only coding sequence, or a portion thereof, is inserted, exogenous translational control signals including the ATG initiation codon should be provided. Furthermore, the initiation codon should be in the correct reading frame to ensure translation of the entire insert. Exogenous translational elements and initiation codons may be of various origins, both natural and synthetic. The efficiency of expression may be enhanced by the inclusion of enhancers which are appropriate for the particular cell system which is used, such as those described in the literature (Scharf, D. et al. (1994) Results Probl. Cell Differ. 20:125-162).

[0161] In addition, a host cell strain may be chosen for its ability to modulate the expression of the inserted sequences or to process the expressed protein in the desired fashion. Such modifications of the polypeptide include, but are not limited to, acetylation, carboxylation. glycosylation, phosphorylation, lipidation, and acylation. Post-translational processing which cleaves a “prepro” form of the protein may also be used to facilitate correct insertion, folding and/or function. Different host cells such as CHO, COS, HeLa, MDCK, HEK293, and WI138, which have specific cellular machinery and characteristic mechanisms for such post-translational activities, may be chosen to ensure the correct modification and processing of the foreign protein.

[0162] For long-term, high-yield production of recombinant proteins, stable expression is generally preferred. For example, cell lines which stably express a polynucleotide of interest may be transformed using expression vectors which may contain viral origins of replication and/or endogenous expression elements and a selectable marker gene on the same or on a separate vector. Following the introduction of the vector, cells may be allowed to grow for 1-2 days in an enriched media before they are switched to selective media. The purpose of the selectable marker is to confer resistance to selection, and its presence allows growth and recovery of cells which successfully express the introduced sequences. Resistant clones of stably transformed cells may be proliferated using tissue culture techniques appropriate to the cell type.

[0163] Any number of selection systems may be used to recover transformed cell lines. These include, but are not limited to, the herpes simplex virus thymidine kinase (Wigler, M. et al. (1977) Cell 11:223-32) and adenine phosphoribosyltransferase (Lowy, I. et al. (1990) Cell 22:817-23) genes which can be employed in tk.sup.- or aprt.sup.- cells, respectively. Also, antimetabolite, antibiotic or herbicide resistance can be used as the basis for selection; for example, dhfr which confers resistance to methotrexate (Wigler, M. et al. (1980) Proc. Natl. Acad. Sci. 77:3567-70); npt, which confers resistance to the aminoglycosides, neomycin and G-418 (Colbere-Garapin, F. et al (1981) J. Mol. Biol. 150:1-14); and als or pat, which confer resistance to chlorsulfuron and phosphinotricin acetyltransferase, respectively (Murry, supra). Additional selectable genes have been described, for example, trpB, which allows cells to utilize indole in place of tryptophan, or hisD, which allows cells to utilize histinol in place of histidine (Hartman, S. C. and R. C. Mulligan (1988) Proc. Natl. Acad. Sci. 85:8047-51). The use of visible markers has gained popularity with such markers as anthocyanins, beta-glucuronidase and its substrate GUS, and luciferase and its substrate luciferin, being widely used not only to identify transformants, but also to quantify the amount of transient or stable protein expression attributable to a specific vector system (Rhodes, C. A. et al. (1995) Methods Mol. Biol. 55:121-131).

[0164] Although the presence/absence of marker gene expression suggests that the gene of interest is also present, its presence and expression may need to be confirmed. For example, if the sequence encoding a polypeptide is inserted within a marker gene sequence, recombinant cells containing sequences can be identified by the absence of marker gene function. Alternatively, a marker gene can be placed in tandem with a polypeptide-encoding sequence under the control of a single promoter. Expression of the marker gene in response to induction or selection usually indicates expression of the tandem gene as well.

[0165] Alternatively, host cells that contain and express a desired polynucleotide sequence may be identified by a variety of procedures known to those of skill in the art. These procedures include, but are not limited to, DNA-DNA or DNA-RNA hybridizations and protein bioassay or immunoassay techniques which include, for example, membrane, solution, or chip based technologies for the detection and/or quantification of nucleic acid or protein.

[0166] A variety of protocols for detecting and measuring the expression of polynucleotide-encoded products, using either polyclonal or monoclonal antibodies specific for the product are known in the art. Examples include enzyme-linked immunosorbent assay (ELISA), radioimmunoassay (RIA), and fluorescence activated cell sorting (FACS). A two-site, monoclonal-based immunoassay utilizing monoclonal antibodies reactive to two non-interfering epitopes on a given polypeptide may be preferred for some applications, but a competitive binding assay may also be employed. These and other assays are described, among other places, in Hampton, R. et al. (1990; Serological Methods, a Laboratory Manual, APS Press, St Paul. Minn.) and Maddox, D. E. et al. (1983; J. Exp. Med. 158:1211-1216).

[0167] A wide variety of labels and conjugation techniques are known by those skilled in the art and may be used in various nucleic acid and amino acid assays. Means for producing labeled hybridization or PCR probes for detecting sequences related to polynucleotides include oligolabeling, nick translation, end-labeling or PCR amplification using a labeled nucleotide. Alternatively, the sequences, or any portions thereof may be cloned into a vector for the production of an mRNA probe. Such vectors are known in the art, are commercially available, and may be used to synthesize RNA probes in vitro by addition of an appropriate RNA polymerase such as T7, T3, or SP6 and labeled nucleotides. These procedures may be conducted using a variety of commercially available kits. Suitable reporter molecules or labels, which may be used include radionuclides, enzymes, fluorescent, chemiluminescent, or chromogenic agents as well as substrates, cofactors, inhibitors, magnetic particles, and the like.

[0168] Host cells transformed with a polynucleotide sequence of interest may be cultured under conditions suitable for the expression and recovery of the protein from cell culture. The protein produced by a recombinant cell may be secreted or contained intracellularly depending on the sequence and/or the vector used. As will be understood by those of skill in the art, expression vectors containing polynucleotides of the invention may be designed to contain signal sequences which direct secretion of the encoded polypeptide through a prokaryotic or eukaryotic cell membrane. Other recombinant constructions may be used to join sequences encoding a polypeptide of interest to nucleotide sequence encoding a polypeptide domain which will facilitate purification of soluble proteins. Such purification facilitating domains include, but are not limited to, metal chelating peptides such as histidine-tryptophan modules that allow purification on immobilized metals, protein A domains that allow purification on immobilized immunoglobulin, and the domain utilized in the FLAGS extension/affinity purification system (Immunex Corp., Seattle, Wash.). The inclusion of cleavable linker sequences such as those specific for Factor XA or enterokinase (Invitrogen. San Diego, Calif.) between the purification domain and the encoded polypeptide may be used to facilitate purification. One such expression vector provides for expression of a fusion protein containing a polypeptide of interest and a nucleic acid encoding 6 histidine residues preceding a thioredoxin or an enterokinase cleavage site. The histidine residues facilitate purification on IMIAC (immobilized metal ion affinity chromatography) as described in Porath, J. et al. (1992, Prot. Exp. Purif. 3:263-281) while the enterokinase cleavage site provides a means for purifying the desired polypeptide from the fusion protein. A discussion of vectors which contain fusion proteins is provided in Kroll, D. J. et al. (1993; DNA Cell Biol. 12:441-453).

[0169] In addition to recombinant production methods, polypeptides of the invention, and fragments thereof, may be produced by direct peptide synthesis using solid-phase techniques (Merrifield J. (1963) J. Am. Chem. Soc. 85:2149-2154). Protein synthesis may be performed using manual techniques or by automation. Automated synthesis may be achieved, for example, using Applied Biosystems 431A Peptide Synthesizer (Perkin Elmer). Alternatively, various fragments may be chemically synthesized separately and combined using chemical methods to produce the full length molecule.

[0170] ANTIBODY COMPOSITIONS, FRAGMENTS THEREOF AND OTHER BINDING AGENTS

[0171] According to another aspect, the present invention further provides binding agents, such as antibodies and antigen-binding fragments thereof, that exhibit immunological binding to a tumor polypeptide disclosed herein, or to a portion, variant or derivative thereof. An antibody, or antigen-binding fragment thereof, is said to “specifically bind,” “immunogically bind,” and/or is “immunologically reactive” to a polypeptide of the invention if it reacts at a detectable level (within, for example, an ELISA assay) with the polypeptide, and does not react detectably with unrelated polypeptides under similar conditions.

[0172] Immunological binding, as used in this context, generally refers to the non-covalent interactions of the type which occur between an immunoglobulin molecule and an antigen for which the immunoglobulin is specific. The strength, or affinity of immunological binding interactions can be expressed in terms of the dissociation constant (K_{d}) of the interaction, wherein a smaller K_{d} represents a greater affinity. Immunological binding properties of selected polypeptides can be quantified using methods well known in the art. One such method entails measuring the rates of antigen-binding site/antigen complex formation and dissociation, wherein those rates depend on the concentrations of the complex partners, the affinity of the interaction, and on geometric parameters that equally influence the rate in both directions. Thus, both the “on rate constant” (Kₒₙ) and the “off rate constant” (K_{off}) can be determined by calculation of the concentrations and the actual rates of association and dissociation. The ratio of K_{off}/Kₒₙ enables cancellation of all parameters not related to affinity, and is thus equal to the dissociation constant K_{d}. See, generally, Davies et al. (1990) Annual Rev. Biochem. 59:439-473.

[0173] An “antigen-binding site,” or “binding portion” of an antibody refers to the part of the immunoglobulin molecule that participates in antigen binding. The antigen binding site is formed by amino acid residues of the N-terminal variable (“V”) regions of the heavy (“H”) and light (“L”) chains. Three highly divergent stretches within the V regions of the heavy and light chains are referred to as “hypervariable regions” which are interposed between more conserved flanking stretches known as “framework regions,” or “FRs”. Thus the term “FR” refers to amino acid sequences which are naturally found between and adjacent to hypervariable regions in immunoglobulins. In an antibody molecule, the three hypervariable regions of a light chain and the three hypervariable regions of a heavy chain are disposed relative to each other in three dimensional space to form an antigen-binding surface. The antigen-binding surface is complementary to the three-dimensional surface of a bound antigen, and the three hypervariable regions of each of the heavy and light chains are referred to as “complementarity-determining regions,” or “CDRs.”

[0174] Binding agents may be further capable of differentiating between patients with and without a cancer, such as colon cancer, using the representative assays provided herein. For example, antibodies or other binding agents that bind to a tumor protein will preferably generate a signal indicating the presence of a cancer in at least about 20% of patients with the disease, more preferably at least about 30% of patients. Alternatively, or in addition, the antibody will generate a negative signal indicating the absence of the disease in at least about 90% of individuals without the cancer. To determine whether a binding agent satisfies this requirement, biological samples (e.g., blood, sera, sputum, urine and/or tumor biopsies) from patients with and without a cancer (as determined using standard clinical tests) may be assayed as described herein for the presence of polypeptides that bind to the binding agent. Preferably, a statistically significant number of samples with and without the disease will be assayed. Each binding agent should satisfy the above criteria; however, those of ordinary skill in the art will recognize that binding agents may be used in combination to improve sensitivity.

[0175] Any agent that satisfies the above requirements may be a binding agent. For example, a binding agent may be a ribosome, with or without a peptide component, an RNA molecule or a polypeptide. In a preferred embodiment, a binding agent is an antibody or an antigen-binding fragment thereof. Antibodies may be prepared by any of a variety of techniques known to those of ordinary skill in the art. See, e.g., Harlow and Lane, Antibodies: A Laboratory Manual, Cold Spring Harbor Laboratory, 1988. In general, antibodies can be produced by cell culture techniques, including the generation of monoclonal antibodies as described herein, or via transfection of antibody genes into suitable bacterial or mammalian cell hosts, in order to allow for the production of recombinant antibodies. In one technique, an immunogen comprising the polypeptide is initially injected into any of a wide variety of mammals (e.g., mice, rats, rabbits, sheep or goats). In this step, the polypeptides of this invention may serve as the immunogen without modification. Alternatively, particularly for relatively short polypeptides, a superior immune response may be elicited if the polypeptide is joined to a carrier protein, such as bovine serum albumin or keyhole limpet hemocyanin. The immunogen is injected into the animal host, preferably according to a predetermined schedule incorporating one or more booster immunizations, and the animals are bled periodically. Polyclonal antibodies specific for the polypeptide may then be purified from such antisera by, for example, affinity chromatography using the polypeptide coupled to a suitable solid support.

[0176] Monoclonal antibodies specific for an antigenic polypeptide of interest may be prepared, for example, using the technique of Kohler and Milstein, Eur. J. Immunol. 6:511-519, 1976, and improvements thereto. Briefly, these methods involve the preparation of immortal cell lines capable of producing antibodies having the desired specificity (i.e., reactivity with the polypeptide of interest). Such cell lines may be produced, for example, from spleen cells obtained from an animal immunized as described above. The spleen cells are then immortalized by, for example, fusion with a myeloma cell fusion partner, preferably one that is syngeneic with the immunized animal. A variety of fusion techniques may be employed. For example, the spleen cells and myeloma cells may be combined with a nonionic detergent for a few minutes and then plated at low density on a selective medium that supports the growth of hybrid cells, but not myeloma cells. A preferred selection technique uses HAT (hypoxanthine, aminopterin, thymidine) selection. After a sufficient time, usually about 1 to 2 weeks, colonies of hybrids are observed. Single colonies are selected and their culture supernatants tested for binding activity against the polypeptide. Hybridomas having high reactivity and specificity are preferred.

[0177] Monoclonal antibodies may be isolated from the supernatants of growing hybridoma colonies. In addition, various techniques may be employed to enhance the yield, such as injection of the hybridoma cell line into the peritoneal cavity of a suitable vertebrate host, such as a mouse. Monoclonal antibodies may then be harvested from the ascites fluid or the blood. Contaminants may be removed from the antibodies by conventional techniques, such as chromatography, gel filtration, precipitation, and extraction. The polypeptides of this invention may be used in the purification process in, for example, an affinity chromatography step.

[0178] A number of therapeutically useful molecules are known in the art which comprise antigen-binding sites that are capable of exhibiting immunological binding properties of an antibody molecule. The proteolytic enzyme papain preferentially cleaves IgG molecules to yield several fragments, two of which (the “F(ab)” fragments) each comprise a covalent heterodimer that includes an intact antigen-binding site. The enzyme pepsin is able to cleave IgG molecules to provide several fragments, including the “F(ab′)₂” fragment which comprises both antigen-binding sites. An “Fv” fragment can be produced by preferential proteolytic cleavage of an IgM, and on rare occasions IgG or IgA immunoglobulin molecule. Fv fragments are, however, more commonly derived using recombinant techniques known in the art. The Fv fragment includes a non-covalent V_{H}::V_{L} heterodimer including an antigen-binding site which retains much of the antigen recognition and binding capabilities of the native antibody molecule. Inbar et al. (1972) Proc. Nat. Acad. Sci. USA 69:2659-2662; Hochman et al. (1976) Biochem 15:2706-2710; and Ehrlich et al. (1980) Biochem 19:4091-4096.

[0179] A single chain Fv (“sFv”) polypeptide is a covalently linked V_{H}::V_{L} heterodimer which is expressed from a gene fusion including V_{H}- and V_{L}-encoding genes linked by a peptide-encoding linker. Huston et al. (1988) Proc. Nat. Acad. Sci. USA 85(16):5879-5883. A number of methods have been described to discern chemical structures for converting the naturally aggregated—but chemically separated—light and heavy polypeptide chains from an antibody V region into an sFv molecule which will fold into a three dimensional structure substantially similar to the structure of an antigen-binding site. See, e.g., U.S. Pat. Nos. 5,091,513 and 5,132,405, to Huston et al.; and U.S. Pat. No. 4,946,778, to Ladner et al.

[0180] Each of the above-described molecules includes a heavy chain and a light chain CDR set, respectively interposed between a heavy chain and a light chain FR set which provide support to the CDRS and define the spatial relationship of the CDRs relative to each other. As used herein, the term “CDR set” refers to the three hypervariable regions of a heavy or light chain V region. Proceeding from the N-terminus of a heavy or light chain, these regions are denoted as “CDR1,” “CDR2,” and “CDR3” respectively. An antigen-binding site, therefore, includes six CDRs, comprising the CDR set from each of a heavy and a light chain V region. A polypeptide comprising a single CDR, (e.g., a CDR1, CDR2 or CDR3) is referred to herein as a “molecular recognition unit.” Crystallographic analysis of a number of antigen-antibody complexes has demonstrated that the amino acid residues of CDRs form extensive contact with bound antigen, wherein the most extensive antigen contact is with the heavy chain CDR3. Thus, the molecular recognition units are primarily responsible for the specificity of an antigen-binding site.

[0181] As used herein, the term “FR set” refers to the four flanking amino acid sequences which frame the CDRs of a CDR set of a heavy or light chain V region. Some FR residues may contact bound antigen; however, FRs are primarily responsible for folding the V region into the antigen-binding site, particularly the FR residues directly adjacent to the CDRS. Within FRs, certain amino residues and certain structural features are very highly conserved. In this regard, all V region sequences contain an internal disulfide loop of around 90 amino acid residues. When the V regions fold into a binding-site, the CDRs are displayed as projecting loop motifs which form an antigen-binding surface. It is generally recognized that there are conserved structural regions of FRs which influence the folded shape of the CDR loops into certain “canonical” structures—regardless of the precise CDR amino acid sequence. Further, certain FR residues are known to participate in non-covalent interdomain contacts which stabilize the interaction of the antibody heavy and light chains.

[0182] A number of “humanized” antibody molecules comprising an antigen-binding site derived from a non-human immunoglobulin have been described, including chimeric antibodies having rodent V regions and their associated CDRs fused to human constant domains (Winter et al. (1991) Nature 349:293-299; Lobuglio et al. (1989) Proc. Nat. Acad. Sci. USA 86:4220-4224; Shaw et al. (1987) J Immunol. 138:4534-4538; and Brown et al. (1987) Cancer Res. 47:3577-3583), rodent CDRs grafted into a human supporting FR prior to fusion with an appropriate human antibody constant domain (Riechmann et al. (1988) Nature 332:323-327; Verhoeyen et al. (1988) Science 239:1534-1536; and Jones et al. (1986) Nature 321:522-525), and rodent CDRs supported by recombinantly veneered rodent FRs (European Patent Publication No. 519,596, published Dec. 23, 1992). These “humanized” molecules are designed to minimize unwanted immunological response toward rodent antihuman antibody molecules which limits the duration and effectiveness of therapeutic applications of those moieties in human recipients.

[0183] As used herein, the terms “veneered FRs” and “recombinantly veneered FRs” refer to the selective replacement of FR residues from, e.g., a rodent heavy or light chain V region, with human FR residues in order to provide a xenogeneic molecule comprising an antigen-binding site which retains substantially all of the native FR polypeptide folding structure. Veneering techniques are based on the understanding that the ligand binding characteristics of an antigen-binding site are determined primarily by the structure and relative disposition of the heavy and light chain CDR sets within the antigen-binding surface. Davies et al. (1990) Ann. Rev. Biochem. 59:439-473. Thus, antigen binding specificity can be preserved in a humanized antibody only wherein the CDR structures, their interaction with each other, and their interaction with the rest of the V region domains are carefully maintained. By using veneering techniques, exterior (e.g., solvent-accessible) FR residues which are readily encountered by the immune system are selectively replaced with human residues to provide a hybrid molecule that comprises either a weakly immunogenic, or substantially non-immunogenic veneered surface.

[0184] The process of veneering makes use of the available sequence data for human antibody variable domains compiled by Kabat et al., in Sequences of Proteins of Immunological Interest, 4th ed., (U.S. Dept. of Health and Human Services, U.S. Government Printing Office, 1987), updates to the Kabat database, and other accessible U.S. and foreign databases (both nucleic acid and protein). Solvent accessibilities of V region amino acids can be deduced from the known three-dimensional structure for human and murine antibody fragments. There are two general steps in veneering a murine antigen-binding site. Initially, the FRs of the variable domains of an antibody molecule of interest are compared with corresponding FR sequences of human variable domains obtained from the above-identified sources. The most homologous human V regions are then compared residue by residue to corresponding murine amino acids. The residues in the murine FR which differ from the human counterpart are replaced by the residues present in the human moiety using recombinant techniques well known in the art. Residue switching is only carried out with moieties which are at least partially exposed (solvent accessible), and care is exercised in the replacement of amino acid residues which may have a significant effect on the tertiary structure of V region domains, such as proline, glycine and charged amino acids.

[0185] In this manner, the resultant “veneered” murine antigen-binding sites are thus designed to retain the murine CDR residues, the residues substantially adjacent to the CDRs, the residues identified as buried or mostly buried (solvent inaccessible), the residues believed to participate in non-covalent (e.g., electrostatic and hydrophobic) contacts between heavy and light chain domains, and the residues from conserved structural regions of the FRs which are believed to influence the “canonical” tertiary structures of the CDR loops. These design criteria are then used to prepare recombinant nucleotide sequences which combine the CDRs of both the heavy and light chain of a murine antigen-binding site into human-appearing FRs that can be used to transfect mammalian cells for the expression of recombinant human antibodies which exhibit the antigen specificity of the murine antibody molecule.

[0186] In another embodiment of the invention, monoclonal antibodies of the present invention may be coupled to one or more therapeutic agents. Suitable agents in this regard include radionuclides, differentiation inducers, drugs, toxins, and derivatives thereof. Preferred radionuclides include ⁹⁰Y, ¹²³I, ¹²⁵I, ¹³¹I, ¹⁸⁶Re, ¹⁸⁸Re, ²¹¹At, and ²¹²Bi. Preferred drugs include methotrexate, and pyrimidine and purine analogs. Preferred differentiation inducers include phorbol esters and butyric acid. Preferred toxins include ricin, abrin, diptheria toxin, cholera toxin, gelonin, Pseudomonas exotoxin, Shigella toxin, and pokeweed antiviral protein.

[0187] A therapeutic agent may be coupled (e.g., covalently bonded) to a suitable monoclonal antibody either directly or indirectly (e.g., via a linker group). A direct reaction between an agent and an antibody is possible when each possesses a substituent capable of reacting with the other. For example, a nucleophilic group, such as an amino or sulfhydryl group, on one may be capable of reacting with a carbonyl-containing group, such as an anhydride or an acid halide, or with an alkyl group containing a good leaving group (e.g., a halide) on the other.

[0188] Alternatively, it may be desirable to couple a therapeutic agent and an antibody via a linker group. A linker group can function as a spacer to distance an antibody from an agent in order to avoid interference with binding capabilities. A linker group can also serve to increase the chemical reactivity of a substituent on an agent or an antibody, and thus increase the coupling efficiency. An increase in chemical reactivity may also facilitate the use of agents, or functional groups on agents, which otherwise would not be possible.

[0189] It will be evident to those skilled in the art that a variety of bifunctional or polyfunctional reagents, both homo- and hetero-functional (such as those described in the catalog of the Pierce Chemical Co., Rockford, Ill.), may be employed as the linker group. Coupling may be effected, for example, through amino groups, carboxyl groups, sulfhydryl groups or oxidized carbohydrate residues. There are numerous references describing such methodology, e.g., U.S. Pat. No. 4,671,958, to Rodwell et al.

[0190] Where a therapeutic agent is more potent when free from the antibody portion of the immunoconjugates of the present invention, it may be desirable to use a linker group which is cleavable during or upon internalization into a cell. A number of different cleavable linker groups have been described. The mechanisms for the intracellular release of an agent from these linker groups include cleavage by reduction of a disulfide bond (e.g., U.S. Pat. No. 4,489,710, to Spitler), by irradiation of a photolabile bond (e.g., U.S. Pat. No. 4,625,014, to Senter et al.), by hydrolysis of derivatized amino acid side chains (e.g., U.S. Pat. No. 4,638,045, to Kohn et al.), by serum complement-mediated hydrolysis (e.g., U.S. Pat. No. 4,671,958, to Rodwell et al.), and acid-catalyzed hydrolysis (e.g., U.S. Pat. No. 4,569,789, to Blattler et al.).

[0191] It may be desirable to couple more than one agent to an antibody. In one embodiment, multiple molecules of an agent are coupled to one antibody molecule. In another embodiment, more than one type of agent may be coupled to one antibody. Regardless of the particular embodiment, immunoconjugates with more than one agent may be prepared in a variety of ways. For example, more than one agent may be coupled directly to an antibody molecule, or linkers that provide multiple sites for attachment can be used. Alternatively, a carrier can be used.

[0192] A carrier may bear the agents in a variety of ways, including covalent bonding either directly or via a linker group. Suitable carriers include proteins such as albumins (e.g., U.S. Pat. No. 4,507,234, to Kato et al.), peptides and polysaccharides such as arninodextran (e.g., U.S. Pat. No. 4,699,784, to Shih et al.). A carrier may also bear an agent by noncovalent bonding or by encapsulation, such as within a liposome vesicle (e.g., U.S. Pat. Nos. 4,429,008 and 4,873,088). Carriers specific for radionuclide agents include radiohalogenated small molecules and chelating compounds. For example, U.S. Pat. No. 4,735,792 discloses representative radiohalogenated small molecules and their synthesis. A radionuclide chelate may be formed from chelating compounds that include those containing nitrogen and sulfur atoms as the donor atoms for binding the metal, or metal oxide, radionuclide. For example, U.S. Pat. No. 4,673,562, to Davison et al. discloses representative chelating compounds and their synthesis.

[0193] T CELL COMPOSITIONS

[0194] The present invention, in another aspect, provides T cells specific for a tumor polypeptide disclosed herein, or for a variant or derivative thereof. Such cells may generally be prepared in vitro or ex vivo, using standard procedures. For example, T cells may be isolated from bone marrow, peripheral blood, or a fraction of bone marrow or peripheral blood of a patient, using a commercially available cell separation system, such as the Isolex™ System, available from Nexell Therapeutics, Inc. (Irvine, Calif.; see also U.S. Pat. No. 5,240,856; U.S. Pat. No. 5,215,926; WO 89/06280; WO 91/16116 and WO 92/07243). Alternatively, T cells may be derived from related or unrelated humans, non-human mammals, cell lines or cultures.

[0195] T cells may be stimulated with a polypeptide, polynucleotide encoding a polypeptide and/or an antigen presenting cell (APC) that expresses such a polypeptide. Such stimulation is performed under conditions and for a time sufficient to permit the generation of T cells that are specific for the polypeptide of interest. Preferably, a tumor polypeptide or polynucleotide of the invention is present within a delivery vehicle, such as a microsphere, to facilitate the generation of specific T cells.

[0196] T cells are considered to be specific for a polypeptide of the present invention if the T cells specifically proliferate, secrete cytokines or kill target cells coated with the polypeptide or expressing a gene encoding the polypeptide. T cell specificity may be evaluated using any of a variety of standard techniques. For example, within a chromium release assay or proliferation assay, a stimulation index of more than two fold increase in lysis and/or proliferation, compared to negative controls, indicates T cell specificity. Such assays may be performed, for example, as described in Chen et al., Cancer Res. 54:1065-1070, 1994. Alternatively, detection of the proliferation of T cells may be accomplished by a variety of known techniques. For example, T cell proliferation can be detected by measuring an increased rate of DNA synthesis (e.g., by pulse-labeling cultures of T cells with tritiated thymidine and measuring the amount of tritiated thymidine incorporated into DNA). Contact with a tumor polypeptide (100 ng/ml-100 μg/ml, preferably 200 ng/ml-25 μg/ml) for 3-7 days will typically result in at least a two fold increase in proliferation of the T cells. Contact as described above for 2-3 hours should result in activation of the T cells, as measured using standard cytokine assays in which a two fold increase in the level of cytokine release (e.g., TNF or IFN-γ) is indicative of T cell activation (see Coligan et al., Current Protocols in Immunology, vol. 1, Wiley Interscience (Greene 1998)). T cells that have been activated in response to a tumor polypeptide, polynucleotide or polypeptide-expressing APC may be CD4⁺ and/or CD8⁺. Tumor polypeptide-specific T cells may be expanded using standard techniques. Within preferred embodiments, the T cells are derived from a patient, a related donor or an unrelated donor, and are administered to the patient following stimulation and expansion.

[0197] For therapeutic purposes, CD4⁺ or CD8⁺ T cells that proliferate in response to a tumor polypeptide, polynucleotide or APC can be expanded in number either in vitro or in vivo. Proliferation of such T cells in vitro may be accomplished in a variety of ways. For example, the T cells can be re-exposed to a tumor polypeptide, or a short peptide corresponding to an immunogenic portion of such a polypeptide, with or without the addition of T cell growth factors, such as interleukin-2, and/or stimulator cells that synthesize a tumor polypeptide. Alternatively, one or more T cells that proliferate in the presence of the tumor polypeptide can be expanded in number by cloning. Methods for cloning cells are well known in the art, and include limiting dilution.

[0198] T CELL RECEPTOR COMPOSITIONS

[0199] The T cell receptor (TCR) consists of 2 different, highly variable polypeptide chains, termed the T-cell receptor α and β chains, that are linked by a disulfide bond (Janeway, Travers, Walport. Immunobiology. Fourth Ed., 148-159. Elsevier Science Ltd/Garland Publishing. 1999). The α/β heterodimer complexes with the invariant CD3 chains at the cell membrane. This complex recognizes specific antigenic peptides bound to MHC molecules. The enormous diversity of TCR specificities is generated much like immunoglobulin diversity, through somatic gene rearrangement. The β chain genes contain over 50 variable (V), 2 diversity (D), over 10 joining (J) segments, and 2 constant region segments (C). The α chain genes contain over 70 V segments, and over 60 J segments but no D segments, as well as one C segment. During T cell development in the thymus, the D to J gene rearrangement of the β chain occurs, followed by the V gene segment rearrangement to the DJ. This functional VDJ₆₂ exon is transcribed and spliced to join to a C_{β}. For the α chain, a V_{α} gene segment rearranges to a J_{α} gene segment to create the functional exon that is then transcribed and spliced to the C_{α}. Diversity is further increased during the recombination process by the random addition of P and N-nucleotides between the V, D, and J segments of the β chain and between the V and J segments in the α chain (Janeway, Travers, Walport. Immunobiology. Fourth Ed., 98 and 150. Elsevier Science Ltd/Garland Publishing. 1999).

[0200] The present invention, in another aspect, provides TCRs specific for a polypeptide disclosed herein, or for a variant or derivative thereof. In accordance with the present invention, polynucleotide and amino acid sequences are provided for the V-J or V-D-J junctional regions or parts thereof for the alpha and beta chains of the T-cell receptor which recognize tumor polypeptides described herein. In general, this aspect of the invention relates to T-cell receptors which recognize or bind tumor polypeptides presented in the context of MHC. In a preferred embodiment the tumor antigens recognized by the T-cell receptors comprise a polypeptide of the present invention. For example, cDNA encoding a TCR specific for a colon tumor peptide can be isolated from T cells specific for a tumor polypeptide using standard molecular biological and recombinant DNA techniques.

[0201] This invention further includes the T-cell receptors or analogs thereof having substantially the same function or activity as the T-cell receptors of this invention which recognize or bind tumor polypeptides. Such receptors include, but are not limited to, a fragment of the receptor, or a substitution, addition or deletion mutant of a T-cell receptor provided herein. This invention also encompasses polypeptides or peptides that are substantially homologous to the T-cell receptors provided herein or that retain substantially the same activity. The term “analog” includes any protein or polypeptide having an amino acid residue sequence substantially identical to the T-cell receptors provided herein in which one or more residues, preferably no more than 5 residues, more preferably no more than 25 residues have been conservatively substituted with a functionally similar residue and which displays the functional aspects of the T-cell receptor as described herein.

[0202] The present invention further provides for suitable mammalian host cells, for example, non-specific T cells, that are transfected with a polynucleotide encoding TCRs specific for a polypeptide described herein, thereby rendering the host cell specific for the polypeptide. The α and β chains of the TCR may be contained on separate expression vectors or alternatively, on a single expression vector that also contains an internal ribosome entry site (IRES) for cap-independent translation of the gene downstream of the IRES. Said host cells expressing TCRs specific for the polypeptide may be used, for example, for adoptive immunotherapy of colon cancer as discussed further below.

[0203] In further aspects of the present invention, cloned TCRs specific for a polypeptide recited herein may be used in a kit for the diagnosis of colon cancer. For example, the nucleic acid sequence or portions thereof, of colon tumor-specific TCRs can be used as probes or primers for the detection of expression of the rearranged genes encoding the specific TCR in a biological sample. Therefore, the present invention further provides for an assay for detecting messenger RNA or DNA encoding the TCR specific for a polypeptide.

[0204] PHARMACEUTICAL COMPOSITIONS

[0205] In additional embodiments, the present invention concerns formulation of one or more of the polynucleotide, polypeptide, T-cell, TCR, and/or antibody compositions disclosed herein in pharmaceutically-acceptable carriers for administration to a cell or an animal, either alone, or in combination with one or more other modalities of therapy.

[0206] It will be understood that, if desired, a composition as disclosed herein may be administered in combination with other agents as well, such as, e.g., other proteins or polypeptides or various pharmaceutically-active agents. In fact, there is virtually no limit to other components that may also be included, given that the additional agents do not cause a significant adverse effect upon contact with the target cells or host tissues. The compositions may thus be delivered along with various other agents as required in the particular instance. Such compositions may be purified from host cells or other biological sources, or alternatively may be chemically synthesized as described herein. Likewise, such compositions may further comprise substituted or derivatized RNA or DNA compositions.

[0207] Therefore, in another aspect of the present invention, pharmaceutical compositions are provided comprising one or more of the polynucleotide, polypeptide, antibody, TCR, and/or T-cell compositions described herein in combination with a physiologically acceptable carrier. In certain preferred embodiments, the pharmaceutical compositions of the invention comprise immunogenic polynucleotide and/or polypeptide compositions of the invention for use in prophylactic and theraputic vaccine applications. Vaccine preparation is generally described in, for example, M. F. Powell and M. J. Newman, eds., “Vaccine Design (the subunit and adjuvant approach),” Plenum Press (NY, 1995). Generally, such compositions will comprise one or more polynucleotide and/or polypeptide 20 compositions of the present invention in combination with one or more immunostimulants.

[0208] It will be apparent that any of the pharmaceutical compositions described herein can contain pharmaceutically acceptable salts of the polynucleotides and polypeptides of the invention. Such salts can be prepared, for example, from pharmaceutically acceptable non-toxic bases, including organic bases (e.g., salts of primary, secondary and tertiary amines and basic amino acids) and inorganic bases (e.g., sodium, potassium, lithium, ammonium, calcium and magnesium salts).

[0209] In another embodiment, illustrative immunogenic compositions, e.g., vaccine compositions, of the present invention comprise DNA encoding one or more of the polypeptides as described above, such that the polypeptide is generated in situ. As noted above, the polynucleotide may be administered within any of a variety of delivery systems known to those of ordinary skill in the art. Indeed, numerous gene delivery techniques are well known in the art, such as those described by Rolland, Crit. Rev. Therap. Drug Carrier Systems 15:143-198, 1998, and references cited therein. Appropriate polynucleotide expression systems will, of course, contain the necessary regulatory DNA regulatory sequences for expression in a patient (such as a suitable promoter and terminating signal). Alternatively, bacterial delivery systems may involve the administration of a bacterium (such as Bacillus-Calmette-Guerrin) that expresses an immunogenic portion of the polypeptide on its cell surface or secretes such an epitope.

[0210] Therefore, in certain embodiments, polynucleotides encoding immunogenic polypeptides described herein are introduced into suitable mammalian host cells for expression using any of a number of known viral-based systems. In one illustrative embodiment, retroviruses provide a convenient and effective platform for gene delivery systems. A selected nucleotide sequence encoding a polypeptide of the present invention can be inserted into a vector and packaged in retroviral particles using techniques known in the art. The recombinant virus can then be isolated and delivered to a subject. A number of illustrative retroviral systems have been described (e.g., U.S. Pat. No. 5,219,740; Miller and Rosman (1989) BioTechniques 7:980-990; Miller, A. D. (1990) Human Gene Therapy 1:5-14; Scarpa et al. (1991) Virology 180:849-852; Burns et al. (1993) Proc. Natl. Acad. Sci. USA 90:8033-8037; and Boris-Lawrie and Temin (1993) Cur. Opin. Genet. Develop. 3:102-109.

[0211] In addition, a number of illustrative adenovirus-based systems have also been described. Unlike retroviruses which integrate into the host genome, adenoviruses persist extrachromosomally thus minimizing the risks associated with insertional mutagenesis (Haj-Ahmad and Graham (1986) J. Virol. 57:267-274; Bett et al. (1993) J. Virol. 67:5911-5921; Mittereder et al. (1994) Human Gene Therapy 5:717-729; Seth et al. (1994) J. Virol. 68:933-940; Barr et al. (1994) Gene Therapy 1:51-58; Berkner, K. L. (1988) BioTechniques 6:616-629; and Rich et al. (1993) Human Gene Therapy 4:461-476).

[0212] Various adeno-associated virus (AAV) vector systems have also been developed for polynucleotide delivery. AAV vectors can be readily constructed using techniques well known in the art. See, e.g., U.S. Pat. Nos. 5,173,414 and 5,139,941; International Publication Nos. WO 92/01070 and WO 93/03769; Lebkowski et al. (1988) Molec. Cell. Biol. 8:3988-3996; Vincent et al. (1990) Vaccines 90 (Cold Spring Harbor Laboratory Press); Carter, B. J. (1992) Current Opinion in Biotechnology 3:533-539; Muzyczka, N. (1992) Current Topics in Microbiol. and Immunol. 158:97-129; Kotin, R. M. (1994) Human Gene Therapy 5:793-801; Shelling and Smith (1994) Gene Therapy 1:165-169; and Zhou et al. (1994) J. Exp. Med. 179:1867-1875.

[0213] Additional viral vectors useful for delivering the polynucleotides encoding polypeptides of the present invention by gene transfer include those derived from the pox family of viruses, such as vaccinia virus and avian poxvirus. By way of example, vaccinia virus recombinants expressing the novel molecules can be constructed as follows. The DNA encoding a polypeptide is first inserted into an appropriate vector so that it is adjacent to a vaccinia promoter and flanking vaccinia DNA sequences, such as the sequence encoding thymidine kinase (TK). This vector is then used to transfect cells which are simultaneously infected with vaccinia. Homologous recombination serves to insert the vaccinia promoter plus the gene encoding the polypeptide of interest into the viral genome. The resulting TK.sup.(-) recombinant can be selected by culturing the cells in the presence of 5-bromodeoxyuridine and picking viral plaques resistant thereto.

[0214] A vaccinia-based infection/transfection system can be conveniently used to provide for inducible, transient expression or coexpression of one or more polypeptides described herein in host cells of an organism. In this particular system, cells are first infected in vitro with a vaccinia virus recombinant that encodes the bacteriophage T7 RNA polymerase. This polymerase displays exquisite specificity in that it only transcribes templates bearing T7 promoters. Following infection, cells are transfected with the polynucleotide or polynucleotides of interest, driven by a T7 promoter. The polymerase expressed in the cytoplasm from the vaccinia virus recombinant transcribes the transfected DNA into RNA which is then translated into polypeptide by the host translational machinery. The method provides for high level, transient, cytoplasmic production of large quantities of RNA and its translation products. See, e.g., Elroy-Stein and Moss, Proc. Nati. Acad. Sci. USA (1990) 87:6743-6747; Fuerst et al. Proc. Natl. Acad. Sci. USA (1986) 83:8122-8126.

[0215] Alternatively, avipoxviruses, such as the fowlpox and canarypox viruses, can also be used to deliver the coding sequences of interest. Recombinant avipox viruses, expressing immunogens from mammalian pathogens, are known to confer protective immunity when administered to non-avian species. The use of an Avipox vector is particularly desirable in human and other mammalian species since members of the Avipox genus can only productively replicate in susceptible avian species and therefore are not infective in mammalian cells. Methods for producing recombinant Avipoxviruses are known in the art and employ genetic recombination, as described above with respect to the production of vaccinia viruses. See, e.g., WO 91/12882; WO 89/03429; and WO 92/03545.

[0216] Any of a number of alphavirus vectors can also be used for delivery of polynucleotide compositions of the present invention, such as those vectors described in U.S. Pat. Nos. 5,843,723; 6,015,686; 6,008,035 and 6,015,694. Certain vectors based on Venezuelan Equine Encephalitis (VEE) can also be used, illustrative examples of which can be found in U.S. Pat. Nos. 5,505,947 and 5,643,576.

[0217] Moreover, molecular conjugate vectors, such as the adenovirus chimeric vectors described in Michael et al. J. Biol. Chem. (1993) 268:6866-6869 and Wagner et al. Proc. Natl. Acad. Sci. USA (1992) 89:6099-6103, can also be used for gene delivery under the invention.

[0218] Additional illustrative information on these and other known viral-based delivery systems can be found, for example, in Fisher-Hoch et al., Proc. Natl. Acad. Sci. USA 86:317-321, 1989; Flexner et al., Ann. N.Y. Acad. Sci. 569:86-103, 1989; Flexner et al., Vaccine 8:17-21, 1990; U.S. Pat. Nos. 4,603,112, 4,769,330, and 5,017,487; WO 89/01973; U.S. Pat. No. 4,777,127; GB 2,200,651; EP 0,345,242; WO 91/02805; Berkner, Biotechniques 6:616-627, 1988; Rosenfeld et al., Science 252:431-434, 1991; Kolls et al., Proc. Natl. Acad. Sci. USA 91:215-219, 1994; Kass-Eisler et al., Proc. Natl. Acad. Sci. USA 90:11498-11502, 1993; Guzman et al., Circulation 88:2838-2848, 1993; and Guzman et al., Cir. Res. 73:1202-1207, 1993.

[0219] In certain embodiments, a polynucleotide may be integrated into the genome of a target cell. This integration may be in the specific location and orientation via homologous recombination (gene replacement) or it may be integrated in a random, non-specific location (gene augmentation). In yet further embodiments, the polynucleotide may be stably maintained in the cell as a separate, episomal segment of DNA. Such polynucleotide segments or “episomes” encode sequences sufficient to permit maintenance and replication independent of or in synchronization with the host cell cycle. The manner in which the expression construct is delivered to a cell and where in the cell the polynucleotide remains is dependent on the type of expression construct employed.

[0220] In another embodiment of the invention, a polynucleotide is administered/delivered as “naked” DNA, for example as described in Ulmer et al., Science 259:1745-1749, 1993 and reviewed by Cohen, Science 259:1691-1692, 1993. The uptake of naked DNA may be increased by coating the DNA onto biodegradable beads, which are efficiently transported into the cells.

[0221] In still another embodiment, a composition of the present invention can be delivered via a particle bombardment approach, many of which have been described. In one illustrative example, gas-driven particle acceleration can be achieved with devices such as those manufactured by Powderject Pharmaceuticals PLC (Oxford, UK) and Powderject Vaccines Inc. (Madison, Wis.), some examples of which are described in U.S. Pat. Nos. 5,846,796; 6,010,478; 5,865,796; 5,584,807; and EP Patent No. 0500 799. This approach offers a needle-free delivery approach wherein a dry powder formulation of microscopic particles, such as polynucleotide or polypeptide particles, are accelerated to high speed within a helium gas jet generated by a hand held device, propelling the particles into a target tissue of interest.

[0222] In a related embodiment, other devices and methods that may be useful for gas-driven needle-less injection of compositions of the present invention include those provided by Bioject, Inc. (Portland, Oreg.), some examples of which are described in U.S. Pat. Nos. 4,790,824; 5,064,413; 5,312,335; 5,383,851; 5,399,163; 5,520,639 and 5,993,412.

[0223] According to another embodiment, the pharmaceutical compositions described herein will comprise one or more immunostimulants in addition to the immunogenic polynucleotide, polypeptide, antibody, T-cell, TCR, and/or APC compositions of this invention. An immunostimulant refers to essentially any substance that enhances or potentiates an immune response (antibody and/or cell-mediated) to an exogenous antigen. One preferred type of immunostimulant comprises an adjuvant. Many adjuvants contain a substance designed to protect the antigen from rapid catabolism, such as aluminum hydroxide or mineral oil, and a stimulator of immune responses, such as lipid A, Bortadella pertussis or Mycobacterium tuberculosis derived proteins. Certain adjuvants are commercially available as, for example, Freund's Incomplete Adjuvant and Complete Adjuvant (Difco Laboratories, Detroit, Mich.); Merck Adjuvant 65 (Merck and Company, Inc., Rahway, N.J.); AS-2 (SmithKline Beecham, Philadelphia, Pa.); aluminum salts such as aluminum hydroxide gel (alum) or aluminum phosphate; salts of calcium, iron or zinc; an insoluble suspension of acylated tyrosine; acylated sugars; cationically or anionically derivatized polysaccharides; polyphosphazenes; biodegradable microspheres; monophosphoryl lipid A and quil A. Cytokines, such as GM-CSF, interleukin-2, -7, -12, and other like growth factors, may also be used as adjuvants.

[0224] Within certain embodiments of the invention, the adjuvant composition is preferably one that induces an immune response predominantly of the Th1 type. High levels of Th1-type cytokines (e.g., IFN-γ, TNFα, IL-2 and IL-12) tend to favor the induction of cell mediated immune responses to an administered antigen. In contrast, high levels of Th2-type cytokines (e.g., IL-4, IL-5, IL-6 and IL-10) tend to favor the induction of humoral immune responses. Following application of a vaccine as provided herein, a patient will support an immune response that includes Th1- and Th2-type responses. Within a preferred embodiment, in which a response is predominantly Th1-type, the level of Th1-type cytokines will increase to a greater extent than the level of Th2-type cytokines. The levels of these cytokines may be readily assessed using standard assays. For a review of the families of cytokines, see Mosmann and Coffman, Ann. Rev. Immunol. 7:145-173, 1989.

[0225] Certain preferred adjuvants for eliciting a predominantly Th1-type response include, for example, a combination of monophosphoryl lipid A, preferably 3-de-O-acylated monophosphoryl lipid A, together with an aluminum salt. MPL® adjuvants are available from Corixa Corporation (Seattle, Wash.; see, for example, U.S. Pat. Nos. 4,436,727; 4,877,611; 4,866,034 and 4,912,094). CpG-containing oligonucleotides (in which the CpG dinucleotide is unmethylated) also induce a predominantly Th1 response. Such oligonucleotides are well known and are described, for example, in WO 96/02555, WO 99/33488 and U.S. Pat. Nos. 6,008,200 and 5,856,462. Immunostimulatory DNA sequences are also described, for example, by Sato et al., Science 273:352, 1996. Another preferred adjuvant comprises a saponin, such as Quil A, or derivatives thereof, including QS21 and QS7 (Aquila Biopharmaceuticals Inc., Framingham, Mass.); Escin; Digitonin; or Gypsophila or Chenopodium quinoa saponins . Other preferred formulations include more than one saponin in the adjuvant combinations of the present invention, for example combinations of at least two of the following group comprising QS21, QS7, Quil A, β-escin, or digitonin.

[0226] Alternatively the saponin formulations may be combined with vaccine vehicles composed of chitosan or other polycationic polymers, polylactide and polylactide-co-glycolide particles, poly-N-acetyl glucosamine-based polymer matrix, particles composed of polysaccharides or chemically modified polysaccharides, liposomes and lipid-based particles, particles composed of glycerol monoesters, etc. The saponins may also be formulated in the presence of cholesterol to form particulate structures such as liposomes or ISCOMs. Furthermore, the saponins may be formulated together with a polyoxyethylene ether or ester, in either a non-particulate solution or suspension, or in a particulate structure such as a paucilamelar liposome or ISCOM. The saponins may also be formulated with excipients such as Carbopol® to increase viscosity, or may be formulated in a dry powder form with a powder excipient such as lactose.

[0227] In one preferred embodiment, the adjuvant system includes the combination of a monophosphoryl lipid A and a saponin derivative, such as the combination of QS21 and 3D-MPL® adjuvant, as described in WO 94/00153, or a less reactogenic composition where the QS21 is quenched with cholesterol, as described in WO 96/33739. Other preferred formulations comprise an oil-in-water emulsion and tocopherol. Another particularly preferred adjuvant formulation employing QS21, 3D-MPL® adjuvant and tocopherol in an oil-in-water emulsion is described in WO 95/17210.

[0228] Another enhanced adjuvant system involves the combination of a CpG-containing oligonucleotide and a saponin derivative particularly the combination of CpG and QS21 is disclosed in WO 00/09159. Preferably the formulation additionally comprises an oil in water emulsion and tocopherol.

[0229] Additional illustrative adjuvants for use in the pharmaceutical compositions of the invention include Montanide ISA 720 (Seppic, France), SAF (Chiron, Calif. United States), ISCOMS (CSL), MF-59 (Chiron), the SBAS series of adjuvants (e.g., SBAS-2 or SBAS-4, available from SmithKline Beecham, Rixensart, Belgium), Detox (Enhanzyn®) (Corixa, Hamilton, Mont.), RC-529 (Corixa, Hamilton, Mont.) and other aminoalkyl glucosaminide 4-phosphates (AGPs), such as those described in pending U.S. patent application Ser. Nos. 08/853,826 and 09/074,720, the disclosures of which are incorporated herein by reference in their entireties, and polyoxyethylene ether adjuvants such as those described in WO 99/52549A1.

[0230] Other preferred adjuvants include adjuvant molecules of the general formula

(I): HO(CH₂CH₂O)ₙ-A—R,

[0231] wherein, n is 1-50, A is a bond or —C(O)—, R is C₁₋₅₀ alkyl or Phenyl C₁₋₅₀ alkyl.

[0232] One embodiment of the present invention consists of a vaccine formulation comprising a polyoxyethylene ether of general formula (I), wherein n is between 1 and 50, preferably 4-24, most preferably 9; the R component is C₁₋₅₀, preferably C₄-C₂₀ alkyl and most preferably C₁₂ alkyl, and A is a bond. The concentration of the polyoxyethylene ethers should be in the range 0.1-20%, preferably from 0.1-10%, and most preferably in the range 0.1-1%. Preferred polyoxyethylene ethers are selected from the following group: polyoxyethylene-9-lauryl ether, polyoxyethylene-9-steoryl ether, polyoxyethylene-8-steoryl ether, polyoxyethylene-4-lauryl ether, polyoxyethylene-35-lauryl ether, and polyoxyethylene-23-lauryl ether. Polyoxyethylene ethers such as polyoxyethylene lauryl ether are described in the Merck index (12th edition: entry 7717). These adjuvant molecules are described in WO 99/52549.

[0233] The polyoxyethylene ether according to the general formula (I) above may, if desired, be combined with another adjuvant. For example, a preferred adjuvant combination is preferably with CpG as described in the pending UK patent application GB 9820956.2.

[0234] According to another embodiment of this invention, an immunogenic composition described herein is delivered to a host via antigen presenting cells (APCs), such as dendritic cells, macrophages, B cells, monocytes and other cells that may be engineered to be efficient APCs. Such cells may, but need not, be genetically modified to increase the capacity for presenting the antigen, to improve activation and/or maintenance of the T cell response, to have anti-tumor effects per se and/or to be immunologically compatible with the receiver (i.e., matched HLA haplotype). APCs may generally be isolated from any of a variety of biological fluids and organs, including tumor and peritumoral tissues, and may be autologous, allogeneic, syngeneic or xenogeneic cells.

[0235] Certain preferred embodiments of the present invention use dendritic cells or progenitors thereof as antigen-presenting cells. Dendritic cells are highly potent APCs (Banchereau and Steinman, Nature 392:245-251, 1998) and have been shown to be effective as a physiological adjuvant for eliciting prophylactic or therapeutic antitumor immunity (see Timmerman and Levy, Ann. Rev. Med. 50:507-529, 1999). In general, dendritic cells may be identified based on their typical shape (stellate in situ, with marked cytoplasmic processes (dendrites) visible in vitro), their ability to take up, process and present antigens with high efficiency and their ability to activate naive T cell responses. Dendritic cells may, of course, be engineered to express specific cell-surface receptors or ligands that are not commonly found on dendritic cells in vivo or ex vivo, and such modified dendritic cells are contemplated by the present invention. As an alternative to dendritic cells, secreted vesicles antigen-loaded dendritic cells (called exosomes) may be used within a vaccine (see Zitvogel et al., Nature Med. 4:594-600, 1998).

[0236] Dendritic cells and progenitors may be obtained from peripheral blood, bone marrow, tumor-infiltrating cells, peritumoral tissues-infiltrating cells, lymph nodes, spleen, skin, umbilical cord blood or any other suitable tissue or fluid. For example, dendritic cells may be differentiated ex vivo by adding a combination of cytokines such as GM-CSF, IL-4, IL-13 and/or TNFα to cultures of monocytes harvested from peripheral blood. Alternatively, CD34 positive cells harvested from peripheral blood, umbilical cord blood or bone marrow may be differentiated into dendritic cells by adding to the culture medium combinations of GM-CSF, IL-3, TNFα, CD40 ligand, LPS, flt3 ligand and/or other compound(s) that induce differentiation, maturation and proliferation of dendritic cells.

[0237] Dendritic cells are conveniently categorized as “immature” and “mature” cells, which allows a simple way to discriminate between two well characterized phenotypes. However, this nomenclature should not be construed to exclude all possible intermediate stages of differentiation. Immature dendritic cells are characterized as APC with a high capacity for antigen uptake and processing, which correlates with the high expression of Fcγ receptor and mannose receptor. The mature phenotype is typically characterized by a lower expression of these markers, but a high expression of cell surface molecules responsible for T cell activation such as class I and class II MHC, adhesion molecules (e.g., CD54 and CD11) and costimulatory molecules (e.g., CD40, CD80, CD86 and 4-1BB).

[0238] APCs may generally be transfected with a polynucleotide of the invention (or portion or other variant thereof) such that the encoded polypeptide, or an immunogenic portion thereof, is expressed on the cell surface. Such transfection may take place ex vivo, and a pharmaceutical composition comprising such transfected cells may then be used for therapeutic purposes, as described herein. Alternatively, a gene delivery vehicle that targets a dendritic or other antigen presenting cell may be administered to a patient, resulting in transfection that occurs in vivo. In vivo and ex vivo transfection of dendritic cells, for example, may generally be performed using any methods known in the art, such as those described in WO 97/24447, or the gene gun approach described by Mahvi et al., Immunology and cell Biology 75:456-460, 1997. Antigen loading of dendritic cells may be achieved by incubating dendritic cells or progenitor cells with the tumor polypeptide, DNA (naked or within a plasmid vector) or RNA; or with antigen-expressing recombinant bacterium or viruses (e.g., vaccinia, fowlpox, adenovirus or lentivirus vectors). Prior to loading, the polypeptide may be covalently conjugated to an immunological partner that provides T cell help (e.g., a carrier molecule). Alternatively, a dendritic cell may be pulsed with a non-conjugated immunological partner, separately or in the presence of the polypeptide.

[0239] While any suitable carrier known to those of ordinary skill in the art may be employed in the pharmaceutical compositions of this invention, the type of carrier will typically vary depending on the mode of administration. Compositions of the present invention may be formulated for any appropriate manner of administration, including for example, topical, oral, nasal, mucosal, intravenous, intracranial, intraperitoneal, subcutaneous and intramuscular administration.

[0240] Carriers for use within such pharmaceutical compositions are a biocompatible, and may also be biodegradable. In certain embodiments, the formulation preferably provides a relatively constant level of active component release. In other embodiments, however, a more rapid rate of release immediately upon administration may be desired. The formulation of such compositions is well within the level of ordinary skill in the art using known techniques. Illustrative carriers useful in this regard include microparticles of poly(lactide-co-glycolide), polyacrylate, latex, starch, cellulose, dextran and the like. Other illustrative delayed-release carriers include supramolecular biovectors, which comprise a non-liquid hydrophilic core (e.g., a cross-linked polysaccharide or oligosaccharide) and, optionally, an external layer comprising an amphiphilic compound, such as a phospholipid (see e.g., U.S. Pat. No. 5,151,254 and PCT applications WO 94/20078, WO/94/23701 and WO 96/06638). The amount of active compound contained within a sustained release formulation depends upon the site of implantation, the rate and expected duration of release and the nature of the condition to be treated or prevented.

[0241] In another illustrative embodiment, biodegradable microspheres (e.g., polylactate polyglycolate) are employed as carriers for the compositions of this invention. Suitable biodegradable microspheres are disclosed, for example, in U.S. Pat. Nos. 4,897,268; 5,075,109; 5,928,647; 5,811,128; 5,820,883; 5,853,763; 5,814,344, 5,407,609 and 5,942,252. Modified hepatitis B core protein carrier systems. such as described in WO/99 40934, and references cited therein, will also be useful for many applications. Another illustrative carrier/delivery system employs a carrier comprising particulate-protein complexes, such as those described in U.S. Pat. No. 5,928,647, which are capable of inducing a class I-restricted cytotoxic T lymphocyte responses in a host.

[0242] In another illustrative embodiment, calcium phosphate core particles are employed as carriers, vaccine adjuvants, or as controlled release matrices for the compositions of this invention. Exemplary calcium phosphate particles are disclosed, for example, in published patent application No. WO/0046147.

[0243] The pharmaceutical compositions of the invention will often further comprise one or more buffers (e.g., neutral buffered saline or phosphate buffered saline), carbohydrates (e.g., glucose, mannose, sucrose or dextrans), mannitol, proteins, polypeptides or amino acids such as glycine, antioxidants, bacteriostats, chelating agents such as EDTA or glutathione, adjuvants (e.g., aluminum hydroxide), solutes that render the formulation isotonic, hypotonic or weakly hypertonic with the blood of a recipient, suspending agents, thickening agents and/or preservatives. Alternatively, compositions of the present invention may be formulated as a lyophilizate.

[0244] The pharmaceutical compositions described herein may be presented in unit-dose or multi-dose containers, such as sealed ampoules or vials. Such containers are typically sealed in such a way to preserve the sterility and stability of the formulation until use. In general, formulations may be stored as suspensions, solutions or emulsions in oily or aqueous vehicles. Alternatively, a pharmaceutical composition may be stored in a freeze-dried condition requiring only the addition of a sterile liquid carrier immediately prior to use.

[0245] The development of suitable dosing and treatment regimens for using the particular compositions described herein in a variety of treatment regimens, including e.g., oral, parenteral, intravenous, intranasal, and intramuscular administration and formulation, is well known in the art, some of which are briefly discussed below for general purposes of illustration.

[0246] In certain applications, the pharmaceutical compositions disclosed herein may be delivered via oral administration to an animal. As such, these compositions may be formulated with an inert diluent or with an assimilable edible carrier, or they may be enclosed in hard- or soft-shell gelatin capsule, or they may be compressed into tablets, or they may be incorporated directly with the food of the diet.

[0247] The active compounds may even be incorporated with excipients and used in the form of ingestible tablets, buccal tables, troches, capsules, elixirs, suspensions, syrups, wafers, and the like (see, for example, Mathiowitz et al., Nature March 1997 27;386(6623):410-4; Hwang et al., Crit Rev Ther Drug Carrier Syst 1998;15(3):243-84; U.S. Pat. No. 5,641,515; U.S. Pat. No. 5,580,579 and U.S. Pat. No. 5,792,451). Tablets, troches, pills, capsules and the like may also contain any of a variety of additional components, for example, a binder, such as gum tragacanth, acacia, cornstarch, or gelatin; excipients, such as dicalcium phosphate; a disintegrating agent, such as corn starch, potato starch, alginic acid and the like; a lubricant, such as magnesium stearate; and a sweetening agent, such as sucrose, lactose or saccharin may be added or a flavoring agent, such as peppermint, oil of wintergreen, or cherry flavoring. When the dosage unit form is a capsule, it may contain, in addition to materials of the above type, a liquid carrier. Various other materials may be present as coatings or to otherwise modify the physical form of the dosage unit. For instance, tablets, pills, or capsules may be coated with shellac, sugar, or both. Of course, any material used in preparing any dosage unit form should be pharmaceutically pure and substantially non-toxic in the amounts employed. In addition, the active compounds may be incorporated into sustained-release preparation and formulations.

[0248] Typically, these formulations will contain at least about 0.1% of the active compound or more, although the percentage of the active ingredient(s) may, of course, be varied and may conveniently be between about 1 or 2% and about 60% or 70% or more of the weight or volume of the total formulation. Naturally, the amount of active compound(s) in each therapeutically useful composition may be prepared is such a way that a suitable dosage will be obtained in any given unit dose of the compound. Factors such as solubility, bioavailability, biological half-life, route of administration, product shelf life, as well as other pharmacological considerations will be contemplated by one skilled in the art of preparing such pharmaceutical formulations, and as such, a variety of dosages and treatment regimens may be desirable.

[0249] For oral administration the compositions of the present invention may alternatively be incorporated with one or more excipients in the form of a mouthwash, dentifrice, buccal tablet, oral spray, or sublingual orally-administered formulation. Alternatively, the active ingredient may be incorporated into an oral solution such as one containing sodium borate, glycerin and potassium bicarbonate, or dispersed in a dentifrice, or added in a therapeutically-effective amount to a composition that may include water, binders, abrasives, flavoring agents, foaming agents, and humectants. Alternatively the compositions may be fashioned into a tablet or solution form that may be placed under the tongue or otherwise dissolved in the mouth.

[0250] In certain circumstances it will be desirable to deliver the pharmaceutical compositions disclosed herein parenterally, intravenously, intramuscularly, or even intraperitoneally. Such approaches are well known to the skilled artisan, some of which are further described, for example, in U.S. Pat. No.5,543,158; U.S. Pat. No. 5,641,515 and U.S. Pat. No. 5,399,363. In certain embodiments, solutions of the active compounds as free base or pharmacologically acceptable salts may be prepared in water suitably mixed with a surfactant, such as hydroxypropylcellulose. Dispersions may also be prepared in glycerol, liquid polyethylene glycols, and mixtures thereof and in oils. Under ordinary conditions of storage and use, these preparations generally will contain a preservative to prevent the growth of microorganisms.

[0251] Illustrative pharmaceutical forms suitable for injectable use include sterile aqueous solutions or dispersions and sterile powders for the extemporaneous preparation of sterile injectable solutions or dispersions (for example, see U.S. Pat. No. 5,466,468). In all cases the form must be sterile and must be fluid to the extent that easy syringability exists.

[0252] It must be stable under the conditions of manufacture and storage and must be preserved against the contaminating action of microorganisms, such as bacteria and fungi. The carrier can be a solvent or dispersion medium containing, for example, water, ethanol, polyol (e.g., glycerol, propylene glycol, and liquid polyethylene glycol, and the like), suitable mixtures thereof, and/or vegetable oils. Proper fluidity may be maintained, for example, by the use of a coating, such as lecithin, by the maintenance of the required particle size in the case of dispersion and/or by the use of surfactants. The prevention of the action of microorganisms can be facilitated by various antibacterial and antifungal agents, for example, parabens, chlorobutanol, phenol, sorbic acid, thimerosal, and the like. In many cases, it will be preferable to include isotonic agents, for example, sugars or sodium chloride. Prolonged absorption of the injectable compositions can be brought about by the use in the compositions of agents delaying absorption, for example, aluminum monostearate and gelatin.

[0253] In one embodiment, for parenteral administration in an aqueous solution, the solution should be suitably buffered if necessary and the liquid diluent first rendered isotonic with sufficient saline or glucose. These particular aqueous solutions are especially suitable for intravenous, intramuscular, subcutaneous and intraperitoneal administration. In this connection, a sterile aqueous medium that can be employed will be known to those of skill in the art in light of the present disclosure. For example, one dosage may be dissolved in 1 ml of isotonic NaCl solution and either added to 1000 ml of hypodermoclysis fluid or injected at the proposed site of infusion, (see for example, “Remington's Pharmaceutical Sciences” 15th Edition, pages 1035-1038 and 1570-1580). Some variation in dosage will necessarily occur depending on the condition of the subject being treated. Moreover, for human administration, preparations will of course preferably meet sterility, pyrogenicity, and the general safety and purity standards as required by FDA Office of Biologics standards.

[0254] In another embodiment of the invention, the compositions disclosed herein may be formulated in a neutral or salt form. Illustrative pharmaceutically-acceptable salts include the acid addition salts (formed with the free amino groups of the protein) and which are formed with inorganic acids such as, for example, hydrochloric or phosphoric acids, or such organic acids as acetic, oxalic, tartaric, mandelic, and the like. Salts formed with the free carboxyl groups can also be derived from inorganic bases such as, for example, sodium, potassium, ammonium, calcium, or ferric hydroxides, and such organic bases as isopropylamine, trimethylamine, histidine, procaine and the like. Upon formulation, solutions will be administered in a manner compatible with the dosage formulation and in such amount as is therapeutically effective.

[0255] The carriers can further comprise any and all solvents, dispersion media, vehicles, coatings, diluents, antibacterial and antifungal agents, isotonic and absorption delaying agents, buffers, carrier solutions, suspensions, colloids, and the like. The use of such media and agents for pharmaceutical active substances is well known in the art. Except insofar as any conventional media or agent is incompatible with the active ingredient, its use in the therapeutic compositions is contemplated. Supplementary active ingredients can also be incorporated into the compositions. The phrase “pharmaceutically-acceptable” refers to molecular entities and compositions that do not produce an allergic or similar untoward reaction when administered to a human.

[0256] In certain embodiments, the pharmaceutical compositions may be delivered by intranasal sprays, inhalation, and/or other aerosol delivery vehicles. Methods for delivering genes, nucleic acids, and peptide compositions directly to the lungs via nasal aerosol sprays has been described, e.g., in U.S. Pat. No. 5,756,353 and U.S. Pat. No. 5,804,212. Likewise, the delivery of drugs using intranasal microparticle resins (Takenaga et al., J Controlled Release March 1998 2;52(1-2):81-7) and lysophosphatidyl-glycerol compounds (U.S. Pat. No. 5,725,871) are also well-known in the pharmaceutical arts. Likewise, illustrative transmucosal drug delivery in the form of a polytetrafluoroetheylene support matrix is described in U.S. Pat. No. 5,780,045.

[0257] In certain embodiments, liposomes, nanocapsules, microparticles, lipid particles, vesicles, and the like, are used for the introduction of the compositions of the present invention into suitable host cells/organisms. In particular, the compositions of the present invention may be formulated for delivery either encapsulated in a lipid particle, a liposome, a vesicle, a nanosphere, or a nanoparticle or the like. Alternatively, compositions of the present invention can be bound, either covalently or non-covalently, to the surface of such carrier vehicles.

[0258] The formation and use of liposome and liposome-like preparations as potential drug carriers is generally known to those of skill in the art (see for example, Lasic, Trends Biotechnol July 1998;16(7):307-21; Takakura, Nippon Rinsho March 1998;56(3):691-5; Chandran et al., Indian J Exp Biol. August 1997;35(8):801-9; Margalit, Crit Rev Ther Drug Carrier Syst. 1995;12(2-3):233-61; U.S. Pat. No. 5,567,434; U.S. Pat. No. 5,552,157; U.S. Pat. No. 5,565,213; U.S. Pat. No. 5,738,868 and U.S. Pat. No. 5,795,587, each specifically incorporated herein by reference in its entirety).

[0259] Liposomes have been used successfully with a number of cell types that are normally difficult to transfect by other procedures, including T cell suspensions, primary hepatocyte cultures and PC 12 cells (Renneisen et al., J Biol Chem. September 1990 25;265(27):16337-42; Muller et al., DNA Cell Biol. April 1990;9(3):221-9). In addition, liposomes are free of the DNA length constraints that are typical of viral-based delivery systems. Liposomes have been used effectively to introduce genes, various drugs, radiotherapeutic agents, enzymes, viruses, transcription factors, allosteric effectors and the like, into a variety of cultured cell lines and animals. Furthermore, he use of liposomes does not appear to be associated with autoimmune responses or unacceptable toxicity after systemic delivery.

[0260] In certain embodiments, liposomes are formed from phospholipids that are dispersed in an aqueous medium and spontaneously form multilamellar concentric bilayer vesicles (also termed multilamellar vesicles (MLVs).

[0261] Alternatively, in other embodiments, the invention provides for pharmaceutically-acceptable nanocapsule formulations of the compositions of the present invention. Nanocapsules can generally entrap compounds in a stable and reproducible way (see, for example, Quintanar-Guerrero et al., Drug Dev Ind Pharm. December 1998;24(12):1113-28). To avoid side effects due to intracellular polymeric overloading, such ultrafine particles (sized around 0.1 μm) may be designed using polymers able to be degraded in vivo. Such particles can be made as described, for example, by Couvreur et al., Crit Rev Ther Drug Carrier Syst. 1988;5(1):1-20; zur Muhlen et al., Eur J Pharm Biopharm. March 1998;45(2):149-55; Zambaux et al. J Controlled Release. January 1998 2;50(1-3):31-40; and U.S. Pat. No. 5,145,684.

[0262] CANCER THERAPEUTIC METHODS

[0263] Immunologic approaches to cancer therapy are based on the recognition that cancer cells can often evade the body's defenses against aberrant or foreign cells and molecules, and that these defenses might be therapeutically stimulated to regain the lost ground, e.g. pgs. 623-648 in Klein, Immunology (Wiley-Interscience, New York, 1982). Numerous recent observations that various immune effectors can directly or indirectly inhibit growth of tumors has led to renewed interest in this approach to cancer therapy, e.g. Jager, et al., Oncology 2001;60(1):1-7; Renner, et al., Ann Hematol December 2000;79(12):651-9.

[0264] Four-basic cell types whose function has been associated with antitumor cell immunity and the elimination of tumor cells from the body are: i) B-lymphocytes which secrete immunoglobulins into the blood plasma for identifying and labeling the nonself invader cells; ii) monocytes which secrete the complement proteins that are responsible for lysing and processing the immunoglobulin-coated target invader cells; iii) natural killer lymphocytes having two mechanisms for the destruction of tumor cells, antibody-dependent cellular cytotoxicity and natural killing; and iv) T-lymphocytes possessing antigen-specific receptors and having the capacity to recognize a tumor cell carrying complementary marker molecules (Schreiber, H., 1989, in Fundamental Immunology (ed). W. E. Paul, pp. 923-955).

[0265] Cancer immunotherapy generally focuses on inducing humoral immune responses, cellular immune responses, or both. Moreover, it is well established that induction of CD4⁺ T helper cells is necessary in order to secondarily induce either antibodies or cytotoxic CD8⁺ T cells. Polypeptide antigens that are selective or ideally specific for cancer cells, particularly colon cancer cells, offer a powerful approach for inducing immune responses against colon cancer, and are an important aspect of the present invention.

[0266] Therefore, in further aspects of the present invention, the pharmaceutical compositions described herein may be used to stimulate an immune response against cancer, particularly for the immunotherapy of colon cancer. Within such methods, the pharmaceutical compositions described herein are administered to a patient, typically a warm-blooded animal, preferably a human. A patient may or may not be afflicted with cancer. Pharmaceutical compositions and vaccines may be administered either prior to or following surgical removal of primary tumors and/or treatment such as administration of radiotherapy or conventional chemotherapeutic drugs. As discussed above, administration of the pharmaceutical compositions may be by any suitable method, including administration by intravenous, intraperitoneal, intramuscular, subcutaneous, intranasal, intradermal, anal, vaginal, topical and oral routes.

[0267] Within certain embodiments, immunotherapy may be active immunotherapy, in which treatment relies on the in vivo stimulation of the endogenous host immune system to react against tumors with the administration of immune response-modifying agents (such as polypeptides and polynucleotides as provided herein).

[0268] Within other embodiments, immunotherapy may be passive immunotherapy, in which treatment involves the delivery of agents with established tumor-immune reactivity (such as effector cells or antibodies) that can directly or indirectly mediate antitumor effects and does not necessarily depend on an intact host immune system. Examples of effector cells include T cells as discussed above, T lymphocytes (such as CD8⁺ cytotoxic T lymphocytes and CD4⁺ T-helper tumor-infiltrating lymphocytes), killer cells (such as Natural Killer cells and lymphokine-activated killer cells), B cells and antigen-presenting cells (such as dendritic cells and macrophages) expressing a polypeptide provided herein. T cell receptors and antibody receptors specific for the polypeptides recited herein may be cloned, expressed and transferred into other vectors or effector cells for adoptive immunotherapy. The polypeptides provided herein may also be used to generate antibodies or anti-idiotypic antibodies (as described above and in U.S. Pat. No. 4,918,164) for passive immunotherapy.

[0269] Monoclonal antibodies may be labeled with any of a variety of labels for desired selective usages in detection, diagnostic assays or therapeutic applications (as described in U.S. Pat. Nos. 6,090,365; 6,015,542; 5,843,398; 5,595,721; and 4,708,930, hereby incorporated by reference in their entirety as if each was incorporated individually). In each case, the binding of the labelled monoclonal antibody to the determinant site of the antigen will signal detection or delivery of a particular therapeutic agent to the antigenic determinant on the non-normal cell. A further object of this invention is to provide the specific monoclonal antibody suitably labelled for achieving such desired selective usages thereof.

[0270] Effector cells may generally be obtained in sufficient quantities for adoptive immunotherapy by growth in vitro, as described herein. Culture conditions for expanding single antigen-specific effector cells to several billion in number with retention of antigen recognition in vivo are well known in the art. Such in vitro culture conditions typically use intermittent stimulation with antigen, often in the presence of cytokines (such as IL-2) and non-dividing feeder cells. As noted above, immunoreactive polypeptides as provided herein may be used to rapidly expand antigen-specific T cell cultures in order to generate a sufficient number of cells for immunotherapy. In particular, antigen-presenting cells, such as dendritic, macrophage, monocyte, fibroblast and/or B cells, may be pulsed with immunoreactive polypeptides or transfected with one or more polynucleotides using standard techniques well known in the art. For example, antigen-presenting cells can be transfected with a polynucleotide having a promoter appropriate for increasing expression in a recombinant virus or other expression system. Cultured effector cells for use in therapy must be able to grow and distribute widely, and to survive long term in vivo. Studies have shown that cultured effector cells can be induced to grow in vivo and to survive long term in substantial numbers by repeated stimulation with antigen supplemented with IL-2 (see, for example, Cheever et al., Immunological Reviews 157:177, 1997).

[0271] Alternatively, a vector expressing a polypeptide recited herein may be introduced into antigen presenting cells taken from a patient and clonally propagated ex vivo for transplant back into the same patient. Transfected cells may be reintroduced into the patient using any means known in the art, preferably in sterile form by intravenous, intracavitary, intraperitoneal or intratumor administration.

[0272] Routes and frequency of administration of the therapeutic compositions described herein, as well as dosage, will vary from individual to individual, and may be readily established using standard techniques. In general, the pharmaceutical compositions and vaccines may be administered by injection (e.g., intracutaneous, intramuscular, intravenous or subcutaneous), intranasally (e.g., by aspiration) or orally. Preferably, between 1 and 10 doses may be administered over a 52 week period. Preferably, 6 doses are administered, at intervals of 1 month, and booster vaccinations may be given periodically thereafter. Alternate protocols may be appropriate for individual patients. A suitable dose is an amount of a compound that, when administered as described above, is capable of promoting an anti-tumor immune response, and is at least 10-50% above the basal (i.e., untreated) level. Such response can be monitored by measuring the anti-tumor antibodies in a patient or by vaccine-dependent generation of cytolytic effector cells capable of killing the patient's tumor cells in vitro. Such vaccines should also be capable of causing an immune response that leads to an improved clinical outcome (e.g., more frequent remissions, complete or partial or longer disease-free survival) in vaccinated patients as compared to non-vaccinated patients. In general, for pharmaceutical compositions and vaccines comprising one or more polypeptides, the amount of each polypeptide present in a dose ranges from about 25 μg to 5 mg per kg of host. Suitable dose sizes will vary with the size of the patient, but will typically range from about 0.1 mL to about 5 mL.

[0273] In general, an appropriate dosage and treatment regimen provides the active compound(s) in an amount sufficient to provide therapeutic and/or prophylactic benefit. Such a response can be monitored by establishing an improved clinical outcome (e.g., more frequent remissions, complete or partial, or longer disease-free survival) in treated patients as compared to non-treated patients. Increases in preexisting immune responses to a tumor protein generally correlate with an improved clinical outcome. Such immune responses may generally be evaluated using standard proliferation, cytotoxicity or cytokine assays, which may be performed using samples obtained from a patient before and after treatment.

[0274] CANCER DETECTION AND DIAGNOSTIC COMPOSITIONS, METHODS AND KITS

[0275] In general, a cancer may be detected in a patient based on the presence of one or more colon tumor proteins and/or polynucleotides encoding such proteins in a biological sample (for example, blood, sera, sputum urine and/or tumor biopsies) obtained from the patient. In other words, such proteins may be used as markers to indicate the presence or absence of a cancer such as colon cancer. In addition, such proteins may be useful for the detection of other cancers. The binding agents provided herein generally permit detection of the level of antigen that binds to the agent in the biological sample.

[0276] Polynucleotide primers and probes may be used to detect the level of mRNA encoding a tumor protein, which is also indicative of the presence or absence of a cancer. In general, a tumor sequence should be present at a level that is at least two-fold, preferably three-fold, and more preferably five-fold or higher in tumor tissue than in normal tissue of the same type from which the tumor arose. Expression levels of a particular tumor sequence in tissue types different from that in which the tumor arose are irrelevant in certain diagnostic embodiments since the presence of tumor cells can be confirmed by observation of predetermined differential expression levels, e.g., 2-fold, 5-fold, etc, in tumor tissue to expression levels in normal tissue of the same type.

[0277] Other differential expression patterns can be utilized advantageously for diagnostic purposes. For example, in one aspect of the invention, overexpression of a tumor sequence in tumor tissue and normal tissue of the same type, but not in other normal tissue types, e.g. PBMCs, can be exploited diagnostically. In this case, the presence of metastatic tumor cells, for example in a sample taken from the circulation or some other tissue site different from that in which the tumor arose, can be identified and/or confirmed by detecting expression of the tumor sequence in the sample, for example using RT-PCR analysis. In many instances, it will be desired to enrich for tumor cells in the sample of interest, e.g., PBMCs, using cell capture or other like techniques.

[0278] There are a variety of assay formats known to those of ordinary skill in the art for using a binding agent to detect polypeptide markers in a sample. See, e.g., Harlow and Lane, Antibodies: A Laboratory Manual, Cold Spring Harbor Laboratory, 1988. In general, the presence or absence of a cancer in a patient may be determined by (a) contacting a biological sample obtained from a patient with a binding agent; (b) detecting in the sample a level of polypeptide that binds to the binding agent; and (c) comparing the level of polypeptide with a predetermined cut-off value.

[0279] In a preferred embodiment, the assay involves the use of binding agent immobilized on a solid support to bind to and remove the polypeptide from the remainder of the sample. The bound polypeptide may then be detected using a detection reagent that contains a reporter group and specifically binds to the binding agent/polypeptide complex. Such detection reagents may comprise, for example, a binding agent that specifically binds to the polypeptide or an antibody or other agent that specifically binds to the binding agent, such as an anti-immunoglobulin, protein G, protein A or a lectin. Alternatively, a competitive assay may be utilized, in which a polypeptide is labeled with a reporter group and allowed to bind to the immobilized binding agent after incubation of the binding agent with the sample. The extent to which components of the sample inhibit the binding of the labeled polypeptide to the binding agent is indicative of the reactivity of the sample with the immobilized binding agent. Suitable polypeptides for use within such assays include full length colon tumor proteins and polypeptide portions thereof to which the binding agent binds, as described above.

[0280] The solid support may be any material known to those of ordinary skill in the art to which the tumor protein may be attached. For example, the solid support may be a test well in a microtiter plate or a nitrocellulose or other suitable membrane. Alternatively, the support may be a bead or disc, such as glass, fiberglass, latex or a plastic material such as polystyrene or polyvinylchloride. The support may also be a magnetic particle or a fiber optic sensor, such as those disclosed, for example, in U.S. Pat. No. 5,359,681. The binding agent may be immobilized on the solid support using a variety of techniques known to those of skill in the art, which are amply described in the patent and scientific literature. In the context of the present invention, the term “immobilization” refers to both noncovalent association, such as adsorption, and covalent attachment (which may be a direct linkage between the agent and functional groups on the support or may be a linkage by way of a cross-linking agent). Immobilization by adsorption to a well in a microtiter plate or to a membrane is preferred. In such cases, adsorption may be achieved by contacting the binding agent, in a suitable buffer, with the solid support for a suitable amount of time. The contact time varies with temperature, but is typically between about 1 hour and about 1 day. In general, contacting a well of a plastic microtiter plate (such as polystyrene or polyvinylchloride) with an amount of binding agent ranging from about 10 ng to about 10 μg, and preferably about 100 ng to about 1 μg, is sufficient to immobilize an adequate amount of binding agent.

[0281] Covalent attachment of binding agent to a solid support may generally be achieved by first reacting the support with a bifunctional reagent that will react with both the support and a functional group, such as a hydroxyl or amino group, on the binding agent. For example, the binding agent may be covalently attached to supports having an appropriate polymer coating using benzoquinone or by condensation of an aldehyde group on the support with an amine and an active hydrogen on the binding partner (see, e.g., Pierce Immunotechnology Catalog and Handbook, 1991, at A12-A13).

[0282] In certain embodiments, the assay is a two-antibody sandwich assay. This assay may be performed by first contacting an antibody that has been immobilized on a solid support, commonly the well of a microtiter plate, with the sample, such that polypeptides within the sample are allowed to bind to the immobilized antibody. Unbound sample is then removed from the immobilized polypeptide-antibody complexes and a detection reagent (preferably a second antibody capable of binding to a different site on the polypeptide) containing a reporter group is added. The amount of detection reagent that remains bound to the solid support is then determined using a method appropriate for the specific reporter group.

[0283] More specifically, once the antibody is immobilized on the support as described above, the remaining protein binding sites on the support are typically blocked. Any suitable blocking agent known to those of ordinary skill in the art, such as bovine serum albumin or Tween 2™ (Sigma Chemical Co., St. Louis, Mo.). The immobilized antibody is then incubated with the sample, and polypeptide is allowed to bind to the antibody. The sample may be diluted with a suitable diluent, such as phosphate-buffered saline (PBS) prior to incubation. In general, an appropriate contact time (i.e., incubation time) is a period of time that is sufficient to detect the presence of polypeptide within a sample obtained from an individual with colon cancer at least about 95% of that achieved at equilibrium between bound and unbound polypeptide. Those of ordinary skill in the art will recognize that the time necessary to achieve equilibrium may be readily determined by assaying the level of binding that occurs over a period of time. At room temperature, an incubation time of about 30 minutes is generally sufficient.

[0284] Unbound sample may then be removed by washing the solid support with an appropriate buffer, such as PBS containing 0.1% Tween 20™. The second antibody, which contains a reporter group, may then be added to the solid support. Preferred reporter groups include those groups recited above.

[0285] The detection reagent is then incubated with the immobilized antibody- polypeptide complex for an amount of time sufficient to detect the bound polypeptide. An appropriate amount of time may generally be determined by assaying the level of binding that occurs over a period of time. Unbound detection reagent is then removed and bound detection reagent is detected using the reporter group. The method employed for detecting the reporter group depends upon the nature of the reporter group. For radioactive groups, scintillation counting or autoradiographic methods are generally appropriate. Spectroscopic methods may be used to detect dyes, luminescent groups and fluorescent groups. Biotin may be detected using avidin, coupled to a different reporter group (commonly a radioactive or fluorescent group or an enzyme). Enzyme reporter groups may generally be detected by the addition of substrate (generally for a specific period of time), followed by spectroscopic or other analysis of the reaction products.

[0286] To determine the presence or absence of a cancer, such as colon cancer, the signal detected from the reporter group that remains bound to the solid support is generally compared to a signal that corresponds to a predetermined cut-off value. In one preferred embodiment, the cut-off value for the detection of a cancer is the average mean signal obtained when the immobilized antibody is incubated with samples from patients without the cancer. In general, a sample generating a signal that is three standard deviations above the predetermined cut-off value is considered positive for the cancer. In an alternate preferred embodiment, the cut-off value is determined using a Receiver Operator Curve, according to the method of Sackett et al., Clinical Epidemiology: A Basic Science for Clinical Medicine, Little Brown and Co., 1985, p. 106-7. Briefly, in this embodiment, the cut-off value may be determined from a plot of pairs of true positive rates (i.e., sensitivity) and false positive rates (100%-specificity) that correspond to each possible cut-off value for the diagnostic test result. The cut-off value on the plot that is the closest to the upper left-hand corner (i.e., the value that encloses the largest area) is the most accurate cut-off value, and a sample generating a signal that is higher than the cut-off value determined by this method may be considered positive. Alternatively, the cut-off value may be shifted to the left along the plot, to minimize the false positive rate, or to the right, to minimize the false negative rate. In general, a sample generating a signal that is higher than the cut-off value determined by this method is considered positive for a cancer.

[0287] In a related embodiment, the assay is performed in a flow-through or strip test format, wherein the binding agent is immobilized on a membrane, such as nitrocellulose. In the flow-through test, polypeptides within the sample bind to the immobilized binding agent as the sample passes through the membrane. A second, labeled binding agent then binds to the binding agent-polypeptide complex as a solution containing the second binding agent flows through the membrane. The detection of bound second binding agent may then be performed as described above. In the strip test format, one end of the membrane to which binding agent is bound is immersed in a solution containing the sample. The sample migrates along the membrane through a region containing second binding agent and to the area of immobilized binding agent. Concentration of second binding agent at the area of immobilized antibody indicates the presence of a cancer. Typically, the concentration of second binding agent at that site generates a pattern, such as a line, that can be read visually. The absence of such a pattern indicates a negative result. In general, the amount of binding agent immobilized on the membrane is selected to generate a visually discernible pattern when the biological sample contains a level of polypeptide that would be sufficient to generate a positive signal in the two-antibody sandwich assay, in the format discussed above. Preferred binding agents for use in such assays are antibodies and antigen-binding fragments thereof. Preferably, the amount of antibody immobilized on the membrane ranges from about 25 ng to about 1 μg, and more preferably from about 50 ng to about 500 ng. Such tests can typically be performed with a very small amount of biological sample.

[0288] Of course, numerous other assay protocols exist that are suitable for use with the tumor proteins or binding agents of the present invention. The above descriptions are intended to be exemplary only. For example, it will be apparent to those of ordinary skill in the art that the above protocols may be readily modified to use tumor polypeptides to detect antibodies that bind to such polypeptides in a biological sample. The detection of such tumor protein specific antibodies may correlate with the presence of a cancer.

[0289] A cancer may also, or alternatively, be detected based on the presence of T cells that specifically react with a tumor protein in a biological sample. Within certain methods, a biological sample comprising CD4⁺ and/or CD8⁺ T cells isolated from a patient is incubated with a tumor polypeptide, a polynucleotide encoding such a polypeptide and/or an APC that expresses at least an immunogenic portion of such a polypeptide, and the presence or absence of specific activation of the T cells is detected. Suitable biological samples include, but are not limited to, isolated T cells. For example, T cells may be isolated from a patient by routine techniques (such as by Ficoll/Hypaque density gradient centrifugation of peripheral blood lymphocytes). T cells may be incubated in vitro for 2-9 days (typically 4 days) at 37° C. with polypeptide (e.g., 5-25 μg/ml). It may be desirable to incubate another aliquot of a T cell sample in the absence of tumor polypeptide to serve as a control. For CD4⁺ T cells, activation is preferably detected by evaluating proliferation of the T cells. For CD8⁺ T cells, activation is preferably detected by evaluating cytolytic activity. A level of proliferation that is at least two fold greater and/or a level of cytolytic activity that is at least 20% greater than in disease-free patients indicates the presence of a cancer in the patient.

[0290] As noted above, a cancer may also, or alternatively, be detected based on the level of mRNA encoding a tumor protein in a biological sample. For example, at least two oligonucleotide primers may be employed in a polymerase chain reaction (PCR) based assay to amplify a portion of a tumor cDNA derived from a biological sample, wherein at least one of the oligonucleotide primers is specific for (i.e., hybridizes to) a polynucleotide encoding the tumor protein. The amplified cDNA is then separated and detected using techniques well known in the art, such as gel electrophoresis.

[0291] Similarly, oligonucleotide probes that specifically hybridize to a polynucleotide encoding a tumor protein may be used in a hybridization assay to detect the presence of polynucleotide encoding the tumor protein in a biological sample.

[0292] To permit hybridization under assay conditions, oligonucleotide primers and probes should comprise an oligonucleotide sequence that has at least about 60%, preferably at least about 75% and more preferably at least about 90%, identity to a portion of a polynucleotide encoding a tumor protein of the invention that is at least 10 nucleotides, and preferably at least 20 nucleotides, in length. Preferably, oligonucleotide primers and/or probes hybridize to a polynucleotide encoding a polypeptide described herein under moderately stringent conditions, as defined above. Oligonucleotide primers and/or probes which may be usefully employed in the diagnostic methods described herein preferably are at least 10-40 nucleotides in length. In a preferred embodiment, the oligonucleotide primers comprise at least 10 contiguous nucleotides, more preferably at least 15 contiguous nucleotides, of a DNA molecule having a sequence as disclosed herein. Techniques for both PCR based assays and hybridization assays are well known in the art (see, for example, Mullis et al., Cold Spring Harbor Symp. Quant. Biol., 51:263, 1987; Erlich ed., PCR Technology, Stockton Press, NY, 1989).

[0293] One preferred assay employs RT-PCR, in which PCR is applied in conjunction with reverse transcription. Typically, RNA is extracted from a biological sample, such as biopsy tissue, and is reverse transcribed to produce cDNA molecules. PCR amplification using at least one specific primer generates a cDNA molecule, which may be separated and visualized using, for example, gel electrophoresis. Amplification may be performed on biological samples taken from a test patient and from an individual who is not afflicted with a cancer. The amplification reaction may be performed on several dilutions of cDNA spanning two orders of magnitude. A two-fold or greater increase in expression in several dilutions of the test patient sample as compared to the same dilutions of the non-cancerous sample is typically considered positive.

[0294] In another aspect of the present invention, cell capture technologies may be used in conjunction, with, for example, real-time PCR to provide a more sensitive tool for detection of metastatic cells expressing colon tumor antigens. Detection of colon cancer cells in biological samples, e.g., bone marrow samples, peripheral blood, and small needle aspiration samples is desirable for diagnosis and prognosis in colon cancer patients.

[0295] Immunomagnetic beads coated with specific monoclonal antibodies to surface cell markers, or tetrameric antibody complexes, may be used to first enrich or positively select cancer cells in a sample. Various commercially available kits may be used, including Dynabeads® Epithelial Enrich (Dynal Biotech, Oslo, Norway), StemSep™ (StemCell Technologies, Inc., Vancouver, BC), and RosetteSep (StemCell Technologies). A skilled artisan will recognize that other methodologies and kits may also be used to enrich or positively select desired cell populations. Dynabeads® Epithelial Enrich contains magnetic beads coated with mAbs specific for two glycoprotein membrane antigens expressed on normal and neoplastic epithelial tissues. The coated beads may be added to a sample and the sample then applied to a magnet, thereby capturing the cells bound to the beads. The unwanted cells are washed away and the magnetically isolated cells eluted from the beads and used in further analyses.

[0296] RosetteSep can be used to enrich cells directly from a blood sample and consists of a cocktail of tetrameric antibodies that targets a variety of unwanted cells and crosslinks them to glycophorin A on red blood cells (RBC) present in the sample, forming rosettes. When centrifuged over Ficoll, targeted cells pellet along with the free RBC. The combination of antibodies in the depletion cocktail determines which cells will be removed and consequently which cells will be recovered. Antibodies that are available include, but are not limited to: CD2, CD3, CD4, CD5, CD8, CD10, CD11b, CD14, CD15, CD16, CD19, CD20, CD24, CD25, CD29, CD33, CD34, CD36, CD38, CD41, CD45, CD45RA, CD45RO, CD56, CD66B, CD66e, HLA-DR, IgE, and TCRαβ.

[0297] Additionally, it is contemplated in the present invention that mAbs specific for colon tumor antigens can be generated and used in a similar manner. For example, mAbs that bind to tumor-specific cell surface antigens may be conjugated to magnetic beads, or formulated in a tetrameric antibody complex, and used to enrich or positively select metastatic colon tumor cells from a sample. Once a sample is enriched or positively selected, cells may be lysed and RNA isolated. RNA may then be subjected to RT-PCR analysis using colon tumor-specific primers in a real-time PCR assay as described herein. One skilled in the art will recognize that enriched or selected populations of cells may be analyzed by other methods (e.g. in situ hybridization or flow cytometry).

[0298] In another embodiment, the compositions described herein may be used as markers for the progression of cancer. In this embodiment, assays as described above for the diagnosis of a cancer may be performed over time, and the change in the level of reactive polypeptide(s) or polynucleotide(s) evaluated. For example, the assays may be performed every 24-72 hours for a period of 6 months to 1 year, and thereafter performed as needed. In general, a cancer is progressing in those patients in whom the level of polypeptide or polynucleotide detected increases over time. In contrast, the cancer is not progressing when the level of reactive polypeptide or polynucleotide either remains constant or decreases with time.

[0299] Certain in vivo diagnostic assays may be performed directly on a tumor. One such assay involves contacting tumor cells with a binding agent. The bound binding agent may then be detected directly or indirectly via a reporter group. Such binding agents may also be used in histological applications. Alternatively, polynucleotide probes may be used within such applications.

[0300] As noted above, to improve sensitivity, multiple tumor protein markers may be assayed within a given sample. It will be apparent that binding agents specific for different proteins provided herein may be combined within a single assay. Further, multiple primers or probes may be used concurrently. The selection of tumor protein markers may be based on routine experiments to determine combinations that results in optimal sensitivity. In addition, or alternatively, assays for tumor proteins provided herein may be combined with assays for other known tumor antigens.

[0301] The present invention further provides kits for use within any of the above diagnostic methods. Such kits typically comprise two or more components necessary for performing a diagnostic assay. Components may be compounds, reagents, containers and/or equipment. For example, one container within a kit may contain a monoclonal antibody or fragment thereof that specifically binds to a tumor protein. Such antibodies or fragments may be provided attached to a support material, as described above. One or more additional containers may enclose elements, such as reagents or buffers, to be used in the assay. Such kits may also, or alternatively, contain a detection reagent as described above that contains a reporter group suitable for direct or indirect detection of antibody binding.

[0302] Alternatively, a kit may be designed to detect the level of mRNA encoding a tumor protein in a biological sample. Such kits generally comprise at least one oligonucleotide probe or primer, as described above, that hybridizes to a polynucleotide encoding a tumor protein. Such an oligonucleotide may be used, for example, within a PCR or hybridization assay. Additional components that may be present within such kits include a second oligonucleotide and/or a diagnostic reagent or container to facilitate the detection of a polynucleotide encoding a tumor protein.

[0303] The following Examples are offered by way of illustration and not by way of limitation.

### EXAMPLES

[0304] Example 1

### IDENTIFICATION OF COLON TUMOR PROTEIN cDNAs

[0305] This Example illustrates the identification of cDNA molecules encoding colon tumor proteins using PCR-based cDNA subtraction methodology.

[0306] A modification of the Clontech (Palo Alto, Calif.) PCR-Select™ cDNA subtraction methodology was employed to obtain cDNA populations enriched in cDNAs derived from transcripts that are differentially expressed in colon tumor samples. By this methodology, mRNA populations were isolated from colon tumor and metastatic tumor samples (“tester” mRNA) as well as from normal tissues, such as brain, pancreas, bone marrow, liver, heart, lung, stomach and small intestine (“driver” mRNA). From the tester and driver mRNA populations, cDNA was synthesized by standard methodology. See, e.g. Ausubel, F. M. et al., Short Protocols in Molecular Biology (4th ed., John Wiley and Sons, Inc., 1999).

[0307] The subtraction steps were performed using a PCR-based protocol that was modified to generate fragments larger than would be derived by the Clontech methodology. By this modified protocol, the tester and driver cDNAs were separately digested with five restriction endonucleases (Mlu I, Msc I, Pvu II, Sal I and Stu I) each of which recognize a unique 6-base pair nucleotide sequence. This digestion resulted in an average cDNA size of 600 bp, rather than the average size of 300 bp that results from digestion with Rsa I according to the Clontech methodology. This modification did not affect the ultimate subtraction efficiency.

[0308] Following the restriction digestion, adapter oligonucleotides having unique nucleotide sequences were ligated onto the 5′ ends of the tester cDNAs; adapter oligonucleotides were not ligated onto the driver cDNAs. The tester and driver cDNAs were subsequently hybridized one to the other using an excess of driver cDNA. This hybridization step resulted in populations of (a) unhybridized tester cDNAs, (b) tester cDNAs hybridized to other tester cDNAs, (c) tester cDNAs hybridized to driver cDNAs, (d) unhybridized driver cDNAs and (e) driver cDNAs hybridized to driver cDNAs.

[0309] Tester cDNAs hybridized to other tester cDNAs were selectively amplified by a polymerase chain reaction (PCR) employing primers complementary to the ligated adapters. Because only tester cDNAs were ligated to adapter sequences, neither unhybridized tester or driver cDNAs, tester cDNAs hybridized to driver cDNAs nor driver cDNAs hybridized to driver cDNAs were amplified using adapter specific oligonucleotides. The PCR amplified tester cDNAs were cloned into the pCR2.1 plasmid vector (Invitrogen; Carlsbad, Calif.) to create libraries enriched in differentially expressed colon tumor antigen and colon metastatic tumor antigen specific cDNAs.

[0310] Three thousand clones from the pCR2.1 tumor antigen cDNA libraries were randomly selected and used to obtain clones for microarray analysis and nucleotide sequencing. The cDNA insert from each pCR2.1 clone was PCR amplified as follows. Briefly, 0.5 μl of glycerol stock solution was added to 99.5 μl of PCR mix containing 80 μl H₂O, 10 μl 10X PCR Buffer, 6 μl MgCl₂, 1 μl 10 mM dNTPs, 1 μl 100 mM M13 forward primer (CACGACGTTGTAAAACGACGG; SEQ ID NO:2236), 1 μl 100 mM M13 reverse primer (CACAGGAAACAGCTATGACC; SEQ ID NO:2237), and 0.5 μl 5 u/ml Taq DNA polymerase. The M13 forward and reverse primers used herein were obtained from Operon Technologies (Alameda, Calif.). The PCR amplification was performed for thirty cycles under the following conditions: 95° C. for 5 minutes, 92° C. for 30 seconds, 57° C. for 40 seconds, 75° C. for 2 minutes and 75° C. for 5 minutes.

[0311] mRNA expression levels for representative clones were determined using microarray technology in colon tumor tissues (n=25), normal colon tissues (n=6), kidney, lung, liver, brain, heart, esophagus, small intestine, stomach, pancreas, adrenal gland, salivary gland, resting PBMC, activated PBMC, bone marrow, dendritic cells, spinal cord, blood vessels, skeletal muscle, skin, breast and fetal tissues. An exemplary methodology for performing the microarray analysis is described in Schena et al., Science 270:467-470. The number of tissue samples tested in each case was one (n=-1), except where specifically noted above; additionally, all the above-mentioned tissues were derived from humans.

[0312] The PCR amplification products were dotted onto slides in an array format, with each product occupying a unique location in the array. mRNA was extracted from the tissue sample to be tested, and fluorescent-labeled cDNA probes were generated by reverse transcription, according to standard methodology, in the presence of fluorescent nucleotides ψ5 and ψ3. See, e.g., Ausubel, et al., supra for exemplary reaction conditions for performing the reverse transcription reaction; ψ5 and ψ3 fluorescent labeled nucleotides may be obtained, e.g., from Amersham Pharmacia (Uppsala, Sweden) or NEN® Life Science Products, Inc. (Boston, Mass.). The microarrays were probed with the fluorescent-labeled cDNAs, the slides were scanned and fluorescence intensity was measured. Genetic MicroSystems instrumentation for preparing the cDNA microarrays and for measuring fluorescence intensity is available from Affymetrix (Santa Clara, Calif.).

[0313] An elevated fluorescence intensity in a microarray sector probed with cDNA probes obtained from a colon tumor or colon metastatic tumor tissue as compared to the fluorescence intensity in the same sector probed with cDNA probes obtained from a normal tissue indicates a tumor antigen gene that is differentially expressed in colon tumor or colon metastatic tumor tissue.

[0314] Clones disclosed herein as SEQ ID NO:1-2231 were identified from the PCR subtracted differential colon tumor and colon metastatic tumor cDNA libraries by the microarray based methodology.

### Example 2

[0315] FULL-LENGTH SEQUENCE OF C931P COLON TUMOR PROTEIN cDNA

[0316] This example discloses the full-length sequence of the C931P colon tumor protein cDNA by LifeSeq Gold Datamining.

[0317] The original sequence for C931P (disclosed herein as SEQ ID NO:1861) was used as a query sequence in a BlastN search of the LifeSeq Gold database (December 2000 release). C931P matched a single LifeSeq Gold gene bin (#475113) that contained 5 template sequences. The 5 template sequences were aligned with C931P in order to determine a consensus, full-length cDNA sequence for C931P that encodes a 371 amino acid ORF (SEQ ID NO:2232 and 2235, respectively). Multiple splice variants were discovered in the LifeSeq Gold database. Two of these splice variants are disclosed herein, one of which encodes the 371 amino acid open reading frame.

[0318] The original clone isolated for C931P (443 bp) was used as a query sequence in a BlastN search of the LifeSeq Gold “LGtemplatesSep2000” search database. This search was done using the LifeSeq gold Web interface provided by Incyte. There was an identical match to a single LifeSeq Gold template sequence, number 475113.7. Then, information regarding gene bin 475113 (to which the 475113.7 sequence belongs) was obtained from the LifeSeq Gold database. This 475113 gene bin consisted of 5 template sequences and 176 clones. The 5 template sequences were aligned with the C931P sequence using the DNAStar Seqman program. Alignment of these sequences showed that each of the 5 template sequences represented an alternative splice form—each sequence had a unique multiple base pair deletion relative to the other sequences. This multiple sequence alignment was used to derive a single sequence that should represent the mature mRNA for the C931P gene, as well as a single open reading frame. This predicted mature mRNA sequence was obtained by incorporating all multiple base pair deletions that were present in the 5 template sequences. The C931P original isolate sequence corresponds to a portion of the gene that is deleted in the predicted fully processed mRNA sequence. Thus, herein 3 sequences obtained from LifeSeq are disclosed. One corresponds to a predicted partially spliced form of the gene (SEQ ID NO:2233) that will align with the C931P original isolate sequence. The second corresponds to the predicted, fully processed mRNA sequence (SEQ ID NO:2232) that will not align with the C931P original isolate sequence. The third sequence corresponds to the predicted coding portion of the sequence only (SEQ ID NO:2234). A single protein sequence is dislosed herein—the predicted C931P full-length protein sequence (SEQ ID NO:2235).

### Example 3

[0319] MRNA EXPRESSION ANALYSIS OF THE C931P COLON TUMOR ANTIGEN USING REAL-TIME PCR

[0320] The colon tumor candidate gene C931P (full length cDNA set forth in SEQ ID NO:2232) was analyzed by real-time PCR, as described below, using the short and extended colon panel. This gene was found to have increased expression in about 50% of colon tumors. Some expression was also observed in lymph nodes and thymus.

[0321] The first-strand cDNA to be used in the quantitative real-time PCR was synthesized from 20 μg of total RNA that had been treated with DNase I (Amplification Grade, Gibco BRL Life Technology, Gaitherburg, Md.), using Superscript Reverse Transcriptase (RT) (Gibco BRL Life Technology, Gaitherburg, Md.). Real-time PCR was performed with a GeneAmp™ 5700 sequence detection system (PE Biosystems, Foster City, Calif.). The 5700 system uses SYBR™ green, a fluorescent dye that only intercalates into double stranded DNA, and a set of gene-specific forward and reverse primers. The increase in fluorescence is monitored during the whole amplification process. The optimal concentration of primers was determined using a checkerboard approach and a pool of cDNAs from breast tumors was used in this process.

[0322] The PCR reaction was performed in 25 μl volumes that include 2.5 μl of SYBR green buffer, 2 μl of cDNA template and 2.5 μl each of the forward and reverse primers for the gene of interest. The cDNAs used for RT reactions were diluted 1:10 for each gene of interest and 1:100 for the β-actin control. In order to quantitate the amount of specific cDNA (and hence initial mRNA) in the sample, a standard curve is generated for each run using the plasmid DNA containing the gene of interest. Standard curves were generated using the Ct values determined in the real-time PCR which were related to the initial cDNA concentration used in the assay. Standard dilution ranging from 20-2×10⁶ copies of the gene of interest was used for this purpose. In addition, a standard curve was generated for β-actin ranging from 200fg-2000 fg. This enabled standardization of the initial RNA content of a tissue sample to the amount of β-actin for comparison purposes. The mean copy number for each group of tissues tested was normalized to a constant amount of β-actin, allowing the evaluation of the over-expression levels seen with each of the genes.

### Example 4

[0323] PEPTIDE PRIMING OF T-HELPER LINES

[0324] Generation of CD4⁺ T helper lines and identification of peptide epitopes derived from tumor-specific antigens that are capable of being recognized by CD4⁺ T cells in the context of HLA class II molecules, is carried out as follows:

[0325] Fifteen-mer peptides overlapping by 10 amino acids, derived from a tumor-specific antigen, are generated using standard procedures. Dendritic cells (DC) are derived from PBMC of a normal donor using GM-CSF and IL-4 by standard protocols. CD4⁺ T cells are generated from the same donor as the DC using MACS beads (Miltenyi Biotec, Auburn, Calif.) and negative selection. DC are pulsed overnight with pools of the 15-mer peptides, with each peptide at a final concentration of 0.25 μg/ml. Pulsed DC are washed and plated at 1×10⁴ cells/well of 96-well V-bottom plates and purified CD4⁺ T cells are added at 1×10⁵/well. Cultures are supplemented with 60 ng/ml IL-6 and 10 ng/ml IL-12 and incubated at 37° C. Cultures are restimulated as above on a weekly basis using DC generated and pulsed as above as antigen presenting cells, supplemented with 5 ng/ml IL-7 and 10 U/ml IL-2. Following 4 in vitro stimulation cycles, resulting CD4⁺ T cell lines (each line corresponding to one well) are tested for specific proliferation and cytokine production in response to the stimulating pools of peptide with an irrelevant pool of peptides used as a control.

### Example 5

[0326] GENERATION OF TUMOR-SPECIFIC CTL LINES USING IN VITRO WHOLE-GENE PRIMING

[0327] Using in vitro whole-gene priming with tumor antigen-vaccinia infected DC (see, for example, Yee et al, The Journal of Immunology, 157(9):4079-86, 1996), human CTL lines are derived that specifically recognize autologous fibroblasts transduced with a specific tumor antigen, as determined by interferon-γ ELISPOT analysis. Specifically, dendritic cells (DC) are differentiated from monocyte cultures derived from PBMC of normal human donors by growing for five days in RPMI medium containing 10% human serum, 50 ng/ml human GM-CSF and 30 ng/ml human IL-4. Following culture, DC are infected overnight with tumor antigen-recombinant vaccinia virus at a multiplicity of infection (M.O.I) of five, and matured overnight by the addition of 3 μg/ml CD40 ligand. Virus is then inactivated by UV irradiation. CD8+ T cells are isolated using a magnetic bead system, and priming cultures are initiated using standard culture techniques. Cultures are restimulated every 7-10 days using autologous primary fibroblasts retrovirally transduced with previously identified tumor antigens. Following four stimulation cycles, CD8+ T cell lines are identified that specifically produce interferon-γ when stimulated with tumor antigen-transduced autologous fibroblasts. Using a panel of HLA-mismatched B-LCL lines transduced with a vector expressing a tumor antigen, and measuring interferon-γ production by the CTL lines in an ELISPOT assay, the HLA restriction of the CTL lines is determined.

### Example 6

[0328] GENERATION AND CHARACTERIZATION OF ANTI-TUMOR ANTIGEN MONOCLONAL ANTIBODIES

[0329] Mouse monoclonal antibodies are raised against E. coli derived tumor antigen proteins as follows: Mice are immunized with Complete Freund's Adjuvant (CFA) containing 50 μg recombinant tumor protein, followed by a subsequent intraperitoneal boost with Incomplete Freund's Adjuvant (IFA) containing 10kg recombinant protein. Three days prior to removal of the spleens, the mice are immunized intravenously with approximately 50 μg of soluble recombinant protein. The spleen of a mouse with a positive titer to the tumor antigen is removed, and a single-cell suspension made and used for fusion to SP2/O myeloma cells to generate B cell hybridomas. The supernatants from the hybrid clones are tested by ELISA for specificity to recombinant tumor protein, and epitope mapped using peptides that spanned the entire tumor protein sequence. The mAbs are also tested by flow cytometry for their ability to detect tumor protein on the surface of cells stably transfected with the cDNA encoding the tumor protein.

### Example 7

[0330] SYNTHESIS OF POLYPEPTIDES

[0331] This Example discloses an exemplary methodology for the preparation of colon tumor proteins.

[0332] Polypeptides may be synthesized on a Perkin Elmer/Applied Biosystems Division 430A peptide synthesizer using FMOC chemistry with HPTU (O-Benzotriazole-N,N,N′,N′-tetramethyluronium hexafluorophosphate) activation. A Gly-Cys-Gly sequence may be attached to the amino terminus of the peptide to provide a method of conjugation, binding to an immobilized surface, or labeling of the peptide. Cleavage of the peptides from the solid support may be carried out using the following cleavage mixture: trifluoroacetic acid:ethanedithiol:thioanisole:water:phenol (40:1:2:2:3). After cleaving for 2 hours, the peptides may be precipitated in cold methyl-t-butyl-ether. The peptide pellets may then be dissolved in water containing 0.1% trifluoroacetic acid (TFA) and lyophilized prior to purification by C18 reverse phase HPLC. A gradient of 0%-60% acetonitrile (containing 0.1% TFA) in water (containing 0.1% TFA) may be used to elute the peptides. Following lyophilization of the pure fractions, the peptides may be characterized using electrospray or other types of mass spectrometry and by amino acid analysis.

[0333] From the foregoing it will be appreciated that, although specific embodiments of the invention have been described herein for purposes of illustration, various modifications may be made without deviating from the spirit and scope of the invention. Accordingly, the invention is not limited except as by the appended claims.

The application's sequence listing, which the Patent Office published only in electronic form, follows.

SEQUENCE LISTING (2237 sequences)

SEQ ID NO: 1 - DNA, 579 bp, Homo sapien
  misc_feature (1)...(579): n = A,T,C or G
acttcagttggtgcacaaaatactgtcatttgctcaaagctggctgccaaatgtttggtgatgaaggcagaaatgaatggctcaaaacttgggagaagagcaaaacctgaaggggccctccagaacaatgatgggctttatgatcctgactgcgatgagagcgggctctttaaggccaagcagtgcaacggcacctccatgtgctggtgtgtgaacactgctggggtcagaagaacagacaaggacactgaaataacctgctctgagcgagtgagaacctactggatcatcattgaactaaaacacaaagcaagagaaaaaccttatgatagtaaaagtttgcggactgcacttcagaaggagatcacaacgcgttatcaactggatccaaaatttatcacgagtattttgtatgagaataatgttatcactattgatctggttcaaaattctnctcaaaaaaactcanaatgatgttggacatagctgatggtggcttattatttttgaaaaagatgttaaaggtgaatccttgtttcattctagaaaatggacctnacagtaaatggggaacaactg

SEQ ID NO: 2 - DNA, 520 bp, Homo sapien
  misc_feature (1)...(520): n = A,T,C or G
acaaaccaagagcttttacagatccagaatttattagtttaaaatgcaggtgaacttttttttgcgtttggtttacttgtctgtcaaatgtttccttaaacatgaaactgaataaggagaagagtatttttaacacttaaatttcttggcaaattttaaaacattttttagtctgtaatacactccacttgaagcacttaagtcttccttaaatgacttttcttaagtaatgatactgtgtgttttcccaaagcacttttaaaaaaatttttataaattactatctgttgaaaaggtgtccttttcctttcttctagtatttttttcttaccaaaattcactaatcttgaatgtttgtgatattaaattccaaaatgcangaatacttgactcatttaaagctaaaattttgttaactgatttcaattataattgtaatggatttttttgactttgtaatggattctttttcatcaaaaaagccttnattttttttatctatgtggaaaacacaataaaa

SEQ ID NO: 3 - DNA, 177 bp, Homo sapien
  misc_feature (1)...(177): n = A,T,C or G
gtactttcngaagatgaaatatttataatgagttatggaaacaatgttttagaaatgttnntcttggtgtaatttaatgcagatttttacctcaattttgttaaaaaacttgataatttgatccctccatctatttaatatttaatattttcagattctagagtatttaaaatttaa

SEQ ID NO: 4 - DNA, 223 bp, Homo sapien
  misc_feature (1)...(223): n = A,T,C or G
acaggacaccaccccganntgaagggcattgcggagggcattggacctccccacccactacagntaactcaagacaacataccatgctacaaagtcaccccattaacacatcctttccaagtcaagacactgccttacaaatgaactccaagactatngaaatgatnaaaannaatcttgttcaaatatacagtatctgctattataggaaacatcagggcgt

SEQ ID NO: 5 - DNA, 414 bp, Homo sapien
  misc_feature (1)...(414): n = A,T,C or G
actttcggaagatgaaatatttataatgagttatggaaacaatgttttagaaatgtttttcttggtgtaatttaatgcagatttttacctcgattttgttaaaaaacttgataatttgatccctccatctatttaatatttaatattttcagattctagagtatttaaaatttaaacacaattataaaattaattataattcctacttatgttagctatgatttagggccaaaactaccctggttttgtcttgcaacttgaaacattgtgtattttaaactatataatttgggaacattattttatagactgtggataaccaaatataagatttgtgatttttaatgcttcatttgtgtaaaatcatttgtatattctatttatagnatgcaatttttctagctcattaaaagt

SEQ ID NO: 6 - DNA, 408 bp, Homo sapien
  misc_feature (1)...(408): n = A,T,C or G
acctgtcccagccacaggcttcttgtccacctcttctcccctgcccaccagctgctcagcgcataagaccttcccgacaggctctgcgtgtgcagctctctgcgtccctcctgggccctccagcgtcagacactaatgggagttcccgagatgctcgggtttgagcagggagcaggcagagctgcagtcagagacattagaaaaccagtctgaattgggtctgtctttgagatgcccaggccagcagaaagcagctcagaagtattgttgctcatggtgtggcaatggactgaactgtaatgaaaatgttatttaatctttgtctctgtattttgatacttgaatgactttcccttttgttttactncatataaaattgttaatctgtctgattttgtctgaattata

SEQ ID NO: 7 - DNA, 489 bp, Homo sapien
  misc_feature (1)...(489): n = A,T,C or G
acaaaaataaacagacatttatttccagacttatcttttacataagttaaatacacatttgtctgaggcactgaaacattcgcatacacaacccaaattcccaggttttgtcagcagatcaatgttaataacaaatcaagttttttttttaaaaaaaacagtgaacagtgttttatacaagcatattgactatttctttcttaaccttaaacattctaaacgtaaaattgtaaagaagattctcctgagttatctttaatgatatttatttcattttctccctcttcccaaaagaaaatttttttcaattatttatataaatactattatctgtaatcagcgtttgatttaaaaatattaaaancccacagtgcttgacacagaatattttctcaataaattgtggctgaacaaattaacgaagcatccacagatccctcaaaacattttaaaaggtcagtcttatggcacattcaggctaatgagaca

SEQ ID NO: 8 - DNA, 195 bp, Homo sapien
accattggtggccaattgatttgatggtaagggagggatcgttgacctcgtctgttatgtaaaggatgcgtagggatgggagggcgatgaggactaggatgatggcgggcaggatagttcagacggtttctatttcctgagcgtctgagatgttagtattagttagttttgttgtgagtgttaggaaaagggcgt

SEQ ID NO: 9 - DNA, 499 bp, Homo sapien
acaatttctttatattcttccttggtgatatctttattttggtaaaatggcttgatggccaattttacctcttgtgctgctttttcttgaatttgcaatttctgatgagaagaaaatgtataatttattatttgccagtcatactgctctcacaaaatcccaaacaagaaattgaaaatacttcatatttacaataagagactctccaactattaacgtgacaaatataaaacagtttatttactaaaacatatcaaacatttctaaaaacaattataaaatattaccagtaatttactggacatcaacacatctagagagaatccttcaaataataatggcatttagacagccaataagaaattcccttcaccactcatacaataaaaagctgatattttttctcctttatcatatacagaattatgaaggttgctctcaaccttgaacttgccttgtctgtcttcgagctatctgcgctggcttccactgcaacact

SEQ ID NO: 10 - DNA, 539 bp, Homo sapien
acttacaacagttttaaagcaattgatactttcagaacaatctcaagcttaattggttaccattataagatgcagaactttttaatgttttctggtccctgaaaattcaatagggccaaatgcattaactggaaatagcatttttttaaagtcttaatcaaagatgataatggataaaacaactatataggctctcatacacaatctttcttaattttcaccttgtaagaaatgattacaatgtccttcaggcttgttatacacccccacagaatcaagaagaaagccaacaaagaattgaacatttcaacaagctaggaaatatttactgtaagcatattgtgaaattctggaagacatactatcaatactttgggaaaacactattaacatgtgttgaagaaggcagtttataaatgaaacattacaaatcttatgtttatgcatacaacttataaaatagaaaaaagctgctatttttccaatagtatagcatcacactaacactatatagttaagattgaaaacttctgtacctc

SEQ ID NO: 11 - DNA, 318 bp, Homo sapien
gcagaaatgaatggctcaaaacttgggagaagagcaaaacctgaaggggccctccagaacaatgatgggctttatgatcctgactgcgatgagagcgggctctttaaggccaagcagtgcaacggcacctccatgtgctggtgtgtgaacactgctggggtcagaagaacagacaaggacactgaaataacctgctctgagcgagtgagaacctactggatcatcattgaactaaaacacaaagcaagagaaaaaccttatgatagtaaaagtttgcggactgcacttcagaaggagatcacaacgcgttatcaactg

SEQ ID NO: 12 - DNA, 168 bp, Homo sapien
acctgtgggtttattacctatgggtttatatcctcaaatacgacattctagtcaaagtcttggtaatataaccaatgttttcaaatgtattctgtcatacaaagagcagatttttattgaacttgtgcaataactatattaccatacaatataaatattcatgaatag

SEQ ID NO: 13 - DNA, 410 bp, Homo sapien
acattaaatgataatgtttgaagatcacacaaagatttcacaaaactataactaatacagaaagatgtgtgaaaacattaggggctttcaaaattttaggtatggaattttgcaaagattattttggcttataagtgttaggcaatcactaacctgaaataagtgacaaaaacatgcagatgattaccatttcaacaaatgaaaagctataaatgtctagctaaaagctaaaatattgtgtagctgaaatactaccatataacaatgggaatttataaaacaggaaaaaaggttattctttaaaagtcttccatgagtaatagactttcagtaattttctataaaaacattcagaaattaagtttctcaaattatgtttatcaccaaaattatgttttcagtagtgactg

SEQ ID NO: 14 - DNA, 374 bp, Homo sapien
acacaatggtttattaaaggaatgtatggcccacatcaacctagcaaggattctactggtaaaccttcctatggccaaaggaaaaacaagcaggagttgagtggctggggtggggtgcaggcaatggagagagggcagaagggtgtagaagctgaaggggtctagaagcttactcctgagtttcttccttctgtcttcaaatctttacttcttatggccaaagacccagctgtttcataggctggagatgcactcttctagactgctcgagacagccagagacaggggaggagggaagaaggatactgtggaaagggatggcggggcaaacatttagagctagaagccactactgggccaatgctaaagtttct

SEQ ID NO: 15 - DNA, 403 bp, Homo sapien
accttcaccagaaattgtcccacattaaaggtctcatcctggagtttgaggaaaagaacaggggcagctgaagttatcaagggaatttttgggcctctgcttagtgaaacacaaaggaacaaagcagctataaactaaatagaatgcaactatctgcttttcttatgctgaccactggagtccatggtggcaagtagagagctgctctaggttcttgaggtttggttttcattattaatttttagggtatgggcactgtgcaaagactccatagctgtgcctaggagtctaggaaaagtgacagaggcttggcttttttacctttagttcagccaagtcattttcaagtcctgagaaatgacatcatcttcaggataaaataatgaggacattagacaaacca

SEQ ID NO: 16 - DNA, 494 bp, Homo sapien
accctcttcaagaatcggatggatgtcgttttgaagggcgacaatcttcctcagtatagaggggtgaacattcggagattgctcaacggtagcatcgtggtcaagaacgatgtcatcctggaggcagactacactttagagtatgaggaactgtttgaaaacctggcagagattgtaaaggccaagattatgaatgaaactagaacaactcttcttgatcctgattcctgcagaaaggccatactgtgctatagtgaagaggacactttcgtggattcatcggtgactccgggctttgacttccaggagcaatgcacccagaaggctgccgaaggatatacccagttctactatgtggatgtcttggatgggaagctggcctgtgtgaacaagtgcaccaaaggaacgaagtcgcaaatgaactgtaacctgggcacctgtcagctgcaacgcagtggcccccgctgcctgtgcccaaatacgaacacacactg

SEQ ID NO: 17 - DNA, 478 bp, Homo sapien
  misc_feature (1)...(478): n = A,T,C or G
acaggtcagagtctncttttcttttctttttgagatggagtcttgctctgttgccagactggagtgcagtggtgcgatctgggctcactgcaatctccacctcccgggttcaagcgattctcctgcctcagcctcccgagtaactgggactacaggtgcgcgccaccaagcccagctcatttttgtatttttagtagagatggggtttcacgatgttggctaggatggtctcgatctctggtcagagtcttttctgtaaatatccttggtaaagaagcaattttagactgtanctgttgcaaatgctttaaggaagaagcaaaaacaactgttcagtcttcctgaaantgaaanaaactanaccagggctgntatatcagaggaaccncaaccagcactccaatcatgatgccgacagtggtcccagctggagagannangagaagttccagatgcagagactgngatgctcttgact

SEQ ID NO: 18 - DNA, 431 bp, Homo sapien
acgagctgcaggaggttatcggcagtggagctactgctgtggttcaggcagccctatgcaaacccaggcaagaacgtgtagcaataaaacggatcaacttggaaaaatgccagaccagtatggatgaactattaaaagaaattcaagccatgagtcagtgcagccatcccaacgtagtgacctattacacctcttttgtggtcaaagatgaactttggctggtcatgaaattactaagtggaggttcaatgttggatatcataaaatacattgtcaaccgaggagaacacaagaatggagttctggaagaggcaataatagcaacaattcttaaagaggttttggaaggcttagactatctacacagaaacggtcagattcacagggattttgaaagctggtaatattcttctgggtgaggatggttcagt

SEQ ID NO: 19 - DNA, 146 bp, Homo sapien
acaaacttttattaggatatctatttatttaatactgaactttggcctactttgtgataagactataaacaaattgaggaaatcactatttctcacttctgtatttctcaaaaaataattttgttacagagttcaatatactgtgt

SEQ ID NO: 20 - DNA, 459 bp, Homo sapien
  misc_feature (1)...(459): n = A,T,C or G
agctgatgtggcttattattttgaaaaagatgttaaaggtgaatccttgtttcattctaagaaaatggacctgacagtaaatggggaacaactggatctggatcctggtcaaactttaatttattatgttgatgaaaaagcacctgaattctcaatgcagggtctaaaagctggtgttattgctgttattgtggttgtggtgatagcagttgttgctggaattgttgtgctggttatttccagaaagaagagaatggcaaagtatgagaaggctgagataaaggagatgggtgagatgcatagggaactcaatgcataactatataatttgaagattatagaagaagggaaatagcanatggacacaaattacaaatgtgtgtgcgtgggacgaaggacatctttgaaggtcatgagtttgttagtttaacatcatatatttgtaatagtgaaacctgt

SEQ ID NO: 21 - DNA, 571 bp, Homo sapien
  misc_feature (1)...(571): n = A,T,C or G
accatttgcctcccggnctcaagcgattntnctgcctcancctcccaagtngctgggattacaggcacctgccaccatgcccggctaattnttgtaattttagtanagacagggtttcaccatgttgcccaggctggtttcnaactcctgacctcaggtgatccacccgcctcggcctnncaaagtgctgggattacaggcttgagcccccgcgcccagccatcaaaatgcttgtttatttctgcatatgttgaatactttttacaatttaaaaaaatgatctgttttgaaggcaaaattgcaaatcttgaaattaagaaggcaaaaatgtaaaggagtcaaaactataaatcaagtatttgggaagtgaagactggaagctaatttgcattaaattcacaaacttttatactctttctgtatatacattttttttntttaaaaaacaactatggatcanaatanccacatttagaacacttttttgntatcagtcaatattttttagatagttagaacctggtcctaagccctaaaaagtgggcttgattctgcagtaaatcttttacaa

SEQ ID NO: 22 - DNA, 283 bp, Homo sapien
actagaagcagccctaaaattaaacaaggatctttatgtccatacgatgagaactctagatttattggccatggaaccaggcatggtaaatggagaaactgagagttctactgctggattgaaagtcaaaaccgaagaaatgcagtgccaggtgtgctatgatttgggcgcagcatacttccagcaaggctccacaaattcagctgtctatgaaaatgccagggaaaaattttttagaaccaaagaactaattgcagagataggttcattatctcttcattgt

SEQ ID NO: 23 - DNA, 496 bp, Homo sapien
accacagcctcatcccttggtcaacaatctacaaccttccacagcagcccaggcgacactgaaaccacactcttacctgacgacaccataacctcaggcctcgtggaggcatctacacccacccacagcagcactggctcgctacacacaacactgacccctgccagctccacaagcgctggtcttcaggaagaatctaccactttccagagctggccaagctcaagtgacacaacaccttcacctcccggcaccacagcagcccctgttgaagtatccacaacctaccacagccgcccgagctcaactccaacaacacacttttctgccagttccacaaccttgggccgtagtgaggaatcaacaacagtccacagcagcccaggtgcaactggaacagcactcttccctacccgctctgcaacctcagttcttgttggagaacctacaacgtcacccatcagttcaggctcaacggaaacaacagcgttacctg

SEQ ID NO: 24 - DNA, 464 bp, Homo sapien
acgtggcaggaccgaaacctgcttcagcagtattcccctactatgtctgccacacatggttgtagaggttaacctaatataagctccctgttccttactaatagtaacaggtagtttttgtttctcttgagaccaagtttagatgtgactgaacattttcactgagcggggtgaagtcaagcaagggggatttgttcttccactggtatagaaattatgttttgaaattttcacattgtctcatggaatttccctgtgagttttcttctggtgagtgactcagttttgcttcctactagacactctgcatctgtatattcagcctataggtaatacttgtgtggttttattaaaatctgaaaaagttagaaaaagtattttcagctggtgtgggtgtccatcctgaataagttcatttgtaaatatttcctcagggattggaatcaaacagttaagcttttaaa

SEQ ID NO: 25 - DNA, 502 bp, Homo sapien
  misc_feature (1)...(502): n = A,T,C or G
acctgtgggtttattacctatgggtttatatcctcaaatacgacattctagtcaaagtcttggtaatataaccaatgttttcaaatgtattctgtcatacaaagagcagatttttattgaacttgtgcaataactatattaccatacaatataaatattcatgaatagtttcccaagtctggagcgaccacatagggagaaaatgtaaatgtctcaatttttgttcacaaaagtatattttatcaaattgctgtaagctgtggatagcttaaaagaaaaaaagtttcctgaaatctgggaaacaagacatttaaagaatcagcaaaatttcaaataaaaaattatgaaaatattatcctcattagttcatttagtcccatgaaattaattattttctctgcttgatcttggtggacagttttcatgaagctgtcagttagttcattaaagttttggaaattctcagacagtgcantggtatcagaaacttgtattcaagagt

SEQ ID NO: 26 - DNA, 386 bp, Homo sapien
  misc_feature (1)...(386): n = A,T,C or G
acggtcagtctgccctaccatcttgggagctaaaattctaaatgtgtgaacagaagagttaatacttcaatgttcaattctgaaatttagaacaatttatatgatttgactagactgctcaaagcaattacaaacacacaattgagtaggtagttggttattttgcttttctgtgggtgggcagtcaaagaacagagagtaacaaatggagtaagaaaaaaaattttgtttctcattttgggggtattcagggggaatcacagggaagtttaaacctctgaaatccatttgaccgatgcactgaggtccaagatgaaattttcaatttcttgaataaccccctttccttgagtatcaaactgattggtangtcacatctctaaagt

SEQ ID NO: 27 - DNA, 449 bp, Homo sapien
acctaaatattttatcaatttgaaacacaaattcataaattgtcattattctcagaggcaacaaagcatagaaataaatatttaagttttttctttcttttcttcttcaatctgtgttttaaggctcagagcagacattaagaaatatcaaacaattttttataaaaagtttttcaaatgtttggcccaaagtgaagttgttctgttgatgttatttaaatattcctctcatcttctcagccacaacttcaaagacgtgttcatgccagtcattcacccaaaataaatttcaattcaatgaaaagtaaataacttagggatctataaatgacactgcaatgtatcttgttccatttttaacaggaagtccttcatgcaaatgtgtgagtctcccaggatgcatgaagctccagccttttcgtggtgactcaatagagcaattgtacctc

SEQ ID NO: 28 - DNA, 462 bp, Homo sapien
  misc_feature (1)...(462): n = A,T,C or G
acttcgctcatcaggcataatgtctaaaatctaatatacataattccattaagtggttgaaggaagcaaataatggaattgtcaattggtcatctggctgtaaggtttgcccttgaactaaaaatgttgtttggggcaagggccagaaatgtggagacatggtttttgttacgcattcttgtattatatgtgactaaatttacaaacaagatacatgtgtaattaaagacccttatggaactggaagacgtcttgtagtgctacattgggtgaaaccgttggtccatttttgtctgtttctatgaagataaaataattgggggccatctagaaatagaaaggcagtgggaagacagattctacggcactgntttcatttaattgggctttaggcactccattcgaatgcagaacctcacctctagttgagaccaagaattggcaaatttgcatgagctcctg

SEQ ID NO: 29 - DNA, 305 bp, Homo sapien
  misc_feature (1)...(305): n = A,T,C or G
acaagctttttttttttttttttttttttttttggctctanagggggtgctatagggtaaatacgggccctatttcaaagatttttaggggaattaattctaggacgatgggcatgaaactgtggtttgctccacanatttcanagcattgaccgtagtatacccccggtcgtgtagcggtgaaagtggtttggtttanacgtccgggaattgcatntgtttttaagcctaatgnggggacagctcatgagtgcaanacgtcttgngatgtaattattatacgaatgggggcttcaatcgggagt

SEQ ID NO: 30 - DNA, 370 bp, Homo sapien
acattccacaagcattgccttcttattttacttcttttagctgtttaactttgtaagatgcaaagaggttggatcaagtttaaatgactgtgctgcccctttcacatcaaagaactactgacaacgaaggccgcgcctgcctttcccatctgtctatctatctggctggcagggaaggaaagaacttgcatgttggtgaaggaagaagtggggtggaagaagtggggtgggacgacagtgaaatctagagtaaaatcaagctggcccaaggtgtcctgcaggctgtaatgcagtttaatcagagtgccatttttttttttgttcaaatgattttaattattggaatgcacaatttttttaatatgcaaat

SEQ ID NO: 31 - DNA, 202 bp, Homo sapien
acttaaactggctttgtatatatgtataaatgctggtggtggtgaaagtagtcttgttttatgaggatgtctgcattaaagcagtaaaataagctttccattttattcataatctaatgtgtgtgtatatatgtatgtgtgtatgtgtgtgtatatatagatgtatatatatacacacacagagatatatacatatggctgt

SEQ ID NO: 32 - DNA, 527 bp, Homo sapien
acaattttgaggtttattttttgtatttttattatttgtgcgaagaaccattattgagtttgcaagataagatgtatttgtattttctagtgtctttttatttataacaacacttttttggcaatcagtttgtagctgtgcccttatttttatagatagtttgccatttcttgggtttaatgtttaacaaggctatagaagtttaaaatagtggacaaatgtttgtgaatacacttttaaaaaattgttttaaaagagaaaagcggtcttgctttgttgcccagactggagtgcagtggcataatcatagctcgccgcaagcctcaaatttttgtgctcagatgatccttttcatctcggcctcctgattagctgggactataggcgtgtgccaccatgcccagctaattttgaaatttgcttgtagagatgggatctcactctgttgtccaggctggtctcagaattctggtgagtgatcctcccacagtggacttccaaagtgctgggattacaggtgtgagcca

SEQ ID NO: 33 - DNA, 481 bp, Homo sapien
  misc_feature (1)...(481): n = A,T,C or G
actggagcaaaagcccagtgtatatgaattggtattcctagagaaaaaaagaaatgctcacacctttgttattttaaagtgttttcttgaaaataattagggagaaaattttctggcaacaggttatgtaagacaacaactttttttattatttcaaaacaaaacaggcacatgccaccatgccccagctaatttttatattttttatagagacagggttttgccatgttgcccacgctggtcttgaactcctggactcaagcaatctgccagcctcggcctgctaaagtgctaggattataggcgnnagtctctgtgcccagcctgacaaaatcttttatttatttaaatgttagtaatacgtttattgatgagactaggagcttctctgcagcatcttcataatacattggttttagttcccacactattcccacatcttatctgggaagattagaaatacagatgtaatatggaagct

SEQ ID NO: 34 - DNA, 51 bp, Homo sapien
cttttgtatgagctgtggctttttcccattgtgaagcattgaatatcacat

SEQ ID NO: 35 - DNA, 134 bp, Homo sapien
actaaatattgctgagagcatccaccccaggaaggactttaccttccaggagctccaaactggcaccacccccagtgctcacatggctgactttatcctccgtgttccatttggcacagcaagtggcagtgtta

SEQ ID NO: 36 - DNA, 512 bp, Homo sapien
  misc_feature (1)...(512): n = A,T,C or G
tttagagacggagtcttgttcagctgcccaggctggagtgcagtggctcgatcttcgctcactgcaaccaccgtctcctgggttcaagcgattctcctgtctcagcctcccaagtagctgggattacaggccaccaccatcatgcccggctaatttttgtatattggtagagacggagtttcactatgttgggcaggctggtcttgaactcctcgcctcaggtgatccgcccgtcttggcctcccaaagtgctaggattacaggcgtaagccaccatgcctggccagatgatgtatttaaatatcataccaaactctgtgtatttatataaagagagactgttaaaagacttcataatataaaaaaaaacaaaaacaaaaacaaaaaaaaactttacgcttaccattgctgcatattgttgcagtataaaacacacacttatctgggatcatgagaatacngcaagaatgtcctgcgtaaactgtaactttgacagcatttaaaaaataaaa

SEQ ID NO: 37 - DNA, 399 bp, Homo sapien
actataagaagacatgcacacaaagatgtttgttatgattattgaagtgttaaatggaagaaaaatgttacccaagtcttctccaaaaagaatggtagatatttccttgaaatgcctaacccatttctggatgagactcatcaatatccccttcactccactctctgccaactcagatataatttccattgggcaccttcacagtaatgccaggattggggcagagatcctgaaagagcttcttataagatggcaaatgtgcctggcaagagcatttgtattttgtcaggtggaggcatgtgctgagagttattcaactatctgaaatgttgaatttggaggttgtgaaaatattgaattatgctattagtttaataatatctgaggcagtaaaatagt

SEQ ID NO: 38 - DNA, 242 bp, Homo sapien
actctgagaacaattaaaattgtccagagatcatttatattaccttccaaattgtttattacccaagatcctttgggagaaaatcttatagaatgggggaacaatatgtggtttaaagttattttaaaatgccagttaatttcctcggcaaaggacaatagaggaacttagcttaattgtctggctttaatttaaactgtgttaatacaacattaaaataaaacactaaatacttttgaggt

SEQ ID NO: 39 - DNA, 526 bp, Homo sapien
  misc_feature (1)...(526): n = A,T,C or G
acaagcttttttttttttttttttttttttttttgggttttctaattttatttgaacacaaaatatttaattttttgcatgtagagaataagaggtaatcattagcctgaaaagagaggatttataatcaacattatgcagaaagaaagcaaaattacaaataccagcctactcacatgaaaatttttcatgtttacnctgatatatatctgagtgcttatcatcaaagtaggaagttaaaaaaaaaaaggcagcttaacaaagttccagtgtttcaaanaaagcacttttaaaaatgtntntacatgaacgaacatttcattatatcataaaataaatgctgcgctgtaagataaaggaagactaacatatntggagtttttggcctttttccgccccctccagctgcaaccatntttaacctgntgaacttaatctcaagggttacaggagtttttttgcttttctttttttctcctgttcagttcacatttcaggctgttcggcanatgcctgngattctgga

SEQ ID NO: 40 - DNA, 407 bp, Homo sapien
  misc_feature (1)...(407): n = A,T,C or G
acacctttgactacagctgcagaagtgttcctttagacaaagttgtgacccattttactctggataagggcagaaacggttcacattccattatttgtaaagttacctgctgttagctttcattatttttgctacactcattntattngnatttaaatgttttaggcaacctangaacaaatgtnaaagtaaagatgcnggaaaaatgaattgcttggnattcattacttnatgtntatcaagcncagcantnaaacanaaacccatgtatttaactttttttaggatttttgcttttgtgattnttttttttttgatacttgcctaacatgcatgtgctgtaaaaatagttaacagggaaataacttgagatgatggctagctttgtttaatgtcttatgaaattt

SEQ ID NO: 41 - DNA, 265 bp, Homo sapien
accattgattttggaaacttcccagtcgttttgtaagcttccactgccgagggaaaatgtaaaatggggaccccgaaataagtgctgatcatcatcagtagcctcgaaaatgagacttccaggtgcactgaggggatggcagaagaacaagcccgtgtagtccttggctagcctgggagggttgtcattcacatccataaggatcaggtggaactctgacacagagcttaaggaagacccccctacttctgtggccaccacttgt

SEQ ID NO: 42 - DNA, 455 bp, Homo sapien
acagatttctgcagctcctcatatggtcagtgaactctgggatcggcgatggctgctcctctttgagcaccggcacatatcagtctgtcctcttgagtaggccattatcctgttaggtcccagcaggtgctccccggatgagagttgagctgaggagtcccctgagcatgagtcatccctcatgcactccgtgccacatctctgttcgtggagcactgactcttccacatgcttcctcttgggagggttagagctctttggggtgctggcactgaagtcctgtcctgtgatagatgacactgggtggtgggtgggtcgagccacttcggggacaggggcaggcctctgtctgcttctccaactctggatttccaggtttcttttgtctggggggagtttgtcaattttctgagcttttgagattagagacttcccacaagttccttgcagagaca

SEQ ID NO: 43 - DNA, 362 bp, Homo sapien
acctaacaagggaagagaatctttcagatgaagggtcaacagaaaataaagaccctaaacacttctaaaagtagaacgcagttgaattttgcataactaatctgggaatggagtaaaagaaacaaggttacagaatgtagtgctttagggactttagaaattaggggcagtatgtatgagaatgtgtgctggacactggaggtgtcccaggagctttgaagcactaggtttggttcaatcccgacaaactcccagccatgtgcaagcactgcctcacggggtgcccagagccatgaattcttttcatctgagttggcatccggtcagctgagcatggaacatggggccaccccaaacgccgt

SEQ ID NO: 44 - DNA, 269 bp, Homo sapien
  misc_feature (1)...(269): n = A,T,C or G
actacaaggtaaaggaanncttaataaaatcaatggagcctttcataccagaaaggattttatttgaaatacccgtattacctttttagattttcttttctgaaatcatgcagagaatatgttctgtgtaaaatctaacatcgttcattggaaatatagaattttttaaaaataatggcacctaaaaacttaatactgtatatcaattaaagtcaatatagtggcatgtaaaatgaagtggaaaaaactaaatatatatatatatatat

SEQ ID NO: 45 - DNA, 404 bp, Homo sapien
  misc_feature (1)...(404): n = A,T,C or G
acagatatctttccagtggacaattcagatactagttctagtgtggatggaaggagaaaacataagcaaccagctctcactgcagattttgtgaattattattttgagagaaatatgcgcatgattcaaattcaggaaaatatggctgaacaaaagaatataaaagataaattagagaatgaacaagaaaagcttcatgtagaatataataagctatgtgaatctttagaagaactacaaaacctgaatggaaaacttcgaagtgaaggacaaggaatatgggctttactaggcagaancacagggcagaagttgaatataccggcaattttgcgagcacccaaggagagaaaaccaagtaaaaaagaaggaggcacacaaaagacatctactcttcctgcagt

SEQ ID NO: 46 - DNA, 292 bp, Homo sapien
  misc_feature (1)...(292): n = A,T,C or G
acgatgtctnntgatgagtttgctaatacaatgccagtcaggccacctacggtgaaaagaaagatgaatcctagggctcagagcactgcagcagatcatttcatattgcttccgtggagtgtggcgagtcagctaaatactttgacgccggtggggatagcgatgattatggtagcggaggtgaaatatgctcgtgtgtctacgtctattcctactgtaaatatatggtgtgctcacacgataaaccctaggaagccaatttgatatcatagctcagaccatacctatgtat

SEQ ID NO: 47 - DNA, 464 bp, Homo sapien
actaagtctagtgatcctttgggcaagttactgaggtgactttgagaatcaggccttctaatctgaagtgtttttatttcacaggctgaagtttctctttggctcatcagctacccaggccttggacctagttgatcgacagtccatcaccttaatctcatcacccagtggaaggcgtgtttaccaggtagaagtctagagatgggggtgatccctacagaaaccccttaggacaaaatgttcttcatctctgtagaagctgttgactagctttaaatatttcctggactgttaaaaggcttttgccccaacttggtaaaattaacgaattgataattttttaaaatttttatttacttttaactgacagaaactgtctatattcatggtatataacatgatgttttgatatatggataccttgtagaataactaaatcaagctaattaacatatctaatacct

SEQ ID NO: 48 - DNA, 308 bp, Homo sapien
  misc_feature (1)...(308): n = A,T,C or G
actaggtttgcactanctaaaaaaataatgtttacagttgtctagatgtaacaattttaaaaacatacaaattcagtatgtagtatgaaaatacattaaaaaaacacataaggaactatgccccataaaaaatataaatgcaacttctattaattatatgaatatcaaaaattaaatattctgatttaaaagtagcttctataaaagtcggagtagtaggcattatttgctttcctaaatgtataaataagaagtatttctagctcaactaaacagaaatatcagtatttcttagcaaaaaatgtagt

SEQ ID NO: 49 - DNA, 237 bp, Homo sapien
acaaagaccctcagagtaagaaaaaaggctggtggtatgcccattttgatggaccatggattgcccggcaaatggaactccatcctgacaagccacccatcctacttgtggctggtaaggacgacatggagatgtgtgagctgaatcttgaggagactggcctgactcggaagcgtggtgctgagatcttgccaagacagtttgaagaaatctgggaacgctgtggaggcatccagt

SEQ ID NO: 50 - DNA, 176 bp, Homo sapien
acttggaaaaggaataatctcttggctttttaatttcactcttgatttcttcaacattatagctgtgaaatatccttcttcatgacctgtaataatctcataattacttgatctcttctttaggtagctataatatgggggaataacttcctgtagaaatatcacatctgggctgt

SEQ ID NO: 51 - DNA, 480 bp, Homo sapien
  misc_feature (1)...(480): n = A,T,C or G
ttttttttttttttttttttgaaaaagtcatggaggccatggggttggcttgaaaccagctttggggggttcgattccttccttttttgnctanattttatgtatacgggttcttcgaatgtgtggtagggtggggggcatccatatagtcactccaggtttatggagggttcttctactattaggacttttcgcttcgaagcgaaggcttctcaaatcatgaaaattattaatattactgctgttananaaatgaatgagcctacagatgataggatgtttcatgtggtgtatgcatcggggtagtccgagtaacgtcggggcattccggataggccgagaaagtgttgtgggaagaaagttagatttacgccgatgaatatgatagtgaaatggattttggcgtaggtttggtctanggtgtagcctganaataggggaaatcagtgaatgaagcctnctatgatggcaaatacagct

SEQ ID NO: 52 - DNA, 512 bp, Homo sapien
  misc_feature (1)...(512): n = A,T,C or G
actaatgactgtaagatgagctataaaatgcttttttttttggatacataatttatagactgggtgtcagaagacttttccaatctactttttgaataaaggaagatggaatataaaatgatttgtttcccttaaaaagagggagggcaggttatagactgaggaactgaacaattttaaaaagttcaaacaattatttgaaccaactatttaccatatctgcagagagtctagaaatcacaattaatttgacttctcgaattcaaaaacggttctgttttatgatagtaacgcaaaaacttcntacctataaattactgtatagaatgtttgtattaagctatttttctctgaatatgtctttagaagaacaaataaaatatttaaacatgtaattaatacatggaatataacaatttcataaaatactgaaatacattaatctttttgtaatcttattttccactagatgtatttaaattcttgaaaatgccttttgactatgacacaaa

SEQ ID NO: 53 - DNA, 413 bp, Homo sapien
  misc_feature (1)...(413): n = A,T,C or G
acaaaaaacccttgagattaatttttttctaaaagaagaccttaccaaaaataacttttaaaaaatctgtcaaaccatatgatagacctgaatattttccttaagactgtaaactttttttctgaaaacaattataaaaaagtagtttataagtaggattatttttctttaaaattttccaagatcatattacttgacaaataagtgtcattttgaaatttaaaacatgattttttcctaataaaattattagttattctgacatcttattaacagatcttagttgaattccacttaatttccctggggacagctgagacactgcatttttccaaatagtcttaaaaagttaaagataggcattatttaaaggagngtcttacagtgaaaaaaagaaatcattcaaagaaaac

SEQ ID NO: 54 - DNA, 396 bp, Homo sapien
tagaggggaagataccaaggtagatatgggggaggtcagtagatgcagacaaccagtctacaatgtgtagatatagacaggaaagaaaaaagaattcagagaccataaggctaaggaaacaagttgggtgtgaaaaaggaaaaaagaattaaggattgcagaaggaaaaagaaagaaaaaagatgggaacaaaaatatgatagcgtataaagagaagaagaaaagaatcacttctaattctctgccccactcttacctctaaattgtcccatcactactgtctactagaaccagagtctattattgattggcccacatcttaagtttgtgcccgcccaggaaaatcaagcacctttccttactttagtcttcaatcttagctgaactgtgtcacgt

SEQ ID NO: 55 - DNA, 366 bp, Homo sapien
  misc_feature (1)...(366): n = A,T,C or G
actgtgcaggtgggttagaggctgcgtggcaggagaggttcagattttcccctgatctgtaagatgtgtttagaggggaaatggtgggggcatccgggccatagaggacattcaggatgactgaatcactgcgcctggcactcactgggttctgggtttcacatttgtagcttgctgtgtcatttcttgtgacattgaatagagtgagggtcctgttgccattgggacagctgcagcctgggactgaccgggnaggctctgattgtttacccaccacaggtaggttgcgtcctgagtctcangttcacaggtgaaggccacagcatccttgtcctccacgggtttggagttgttgctggagatgga

SEQ ID NO: 56 - DNA, 474 bp, Homo sapien
  misc_feature (1)...(474): n = A,T,C or G
ggcgggtggatcatgagatcaggagatcgagactatcctggctaacacggtgaaatcccatctctaataaaaatacaaaaaattagccaggcgtggtggcatgcgcctgaggtgccagctactcgggtggatcatgagatcaggagatcgagactatcctggctaacacggtgaaatcccatctctaataaaaatacaaaaaaaaaaaaaaaagaatgaagatgaccagtttacataatttatctaataacttccactttttgaaatatatctaanaataaggaattaaaccaaatacacaggtgccaacattggtttacagttatactaaagctcacatacataggtcataatagttctacaagtcctgactgtaggcccttagtctattttggattaagttctatagcagaattgttttggtttaccaaaaataaagtcagtcatggacagttgcaacaaaataataaactg

SEQ ID NO: 57 - DNA, 533 bp, Homo sapien
  misc_feature (1)...(533): n = A,T,C or G
actgtaaatcanaatcacctgacgggcttgttaaaccagattggtaggccttactctcagagcttctgattcagcaggttttgcgtggggcctgcaaatatgcattatcaagttctcaggtaatgctatgctattagtctatggattacactttgagaaccactggactaggcatatgtgtaagagtgactgtgcgtgtgagtgtgtgtccccaggtgaattctaatcacaaaactactgtatagaaaatatcaataaggttctaagttttaggatactgagattttaatataataagagttgttaaacatcaagatgatttatagaaaggagacctatggacaaatatcaacttattggtcaataaaacttgttccttaaagtcttttacagtatttttttgaaaattaactttttttttaactgcatatatgggtccttcacttcatttttcagtaaagacaacttatttggatatcagtgtctcatcacttgataaggaccagtggaggatttggatagtagccagctgt

SEQ ID NO: 58 - DNA, 377 bp, Homo sapien
  misc_feature (1)...(377): n = A,T,C or G
acataaaatttacaaaaaaaagagacaggaaaattaaaataatcaaatctatataaatacatgaatcatgctgacaacacaggactgatttttcgtttgattattttaacacagacagatgtaaatcccaaaagacgttgggaaatggcacagccgatgaaaacctcacgatgacagtagttgggacactggaaatggctagcacgtccagaggcgcaggatccagcgcagccatgcccattcggctcaccaaaaaaagncttggaagcactgctgcaaagaacagcgcggattactcacatcacctctaggttcactaaagtcaggcactttggggggagttgagagtcagacttccgtgtgctgntgggaatcca

SEQ ID NO: 59 - DNA, 364 bp, Homo sapien
acgctacaaacaaaagatatattagagacttttgaaaaatgctgaaatactttgcttcagaattggaatgtttatattatgtagaaatcttcaaaggtagcattattaaatagcaaagaataattagaacccacatatcttttttgtgtggatggggaaaatgttttaaaatccagttatttaatatgagtttgagagagaaaattgttttttaaaaatatatgtgcattgaaatgatggcaatgcttatagtatgatcaagtatgaaaggaactttaaattcttatatttacttttctctcagtaaattgttaaattttcactcagcaaaagattggcatttgttaagtgttctatatttagt

SEQ ID NO: 60 - DNA, 492 bp, Homo sapien
  misc_feature (1)...(492): n = A,T,C or G
acttgcatttgacttacgatgtatctgtgaaaatgggatgatattgacaaatggagactcctacctcaatagttaatggaataataagaggctactgttgtgtctaatgttcttcaaaaaagtaatatcctcacttggagagtgtcaaatacatactttgaggattgactttatataaggtgccctgtagaaatctgttacacatatttttgacccatattatttacaatgtcttgataattctacctttttagagcaagaatagtatctgctaatgtaagggacatctgtatttaactcctttgtagacatgaatttctatcaaaatgttctttgcactgtaacagagattccttttttcaataatcttaattcaaaagcattattagacttgaaagggtttgataatctcccagtccttagtaaagattgagagaggctggagcagttttcanttttaaatgagtctgcagttaatatcaaatgtgagtt

SEQ ID NO: 61 - DNA, 378 bp, Homo sapien
acaaagataacatttatcttataacaaaaatttgatagttttaaaggttagtattgtgtagggtattttccaaaagactaaagagataactcaggtaaaaagttagaaatgtataaaacaccatcagacaggtttttaaaaaacaacatattacaaaattagacaatcatccttaaaaaaaaaaacttattgtatcaatttcttttgttcaaaatgactgacttaagtatttttaaatatttcagaaacacttcctcaaaaattttcaagatggtagctttcagatgttccctcagtcccaatgttgctcagataaataaatctcgtgagaacttaccacccaccacaagctttctggggcatgcaacagtgtcttta

SEQ ID NO: 62 - DNA, 209 bp, Homo sapien
  misc_feature (1)...(209): n = A,T,C or G
acaagaacctcactcactggacattgaaattctactgtccaatcccaactcactgctgttgatttgaaacctgattctggcagctcatttatcttggtttcctcatttgtaaggncgntcagttggactgatcatntctgagggccttgaagccctaacaagnntatcatgatcccagatgtaaaatatatatatgtgtatatatataa

SEQ ID NO: 63 - DNA, 448 bp, Homo sapien
acttaagaataagaataacatggtccattcacctttatgttatagatatgtctttgtgtaaatcatttgttttgagttttcaaagaatagcccattgttcattcttgtgctgtacctgcccgggcggccgcccgggcaggtacggctatagcctggactttcctgttgtctacaccaatgcccaactgcctgccttagggtagtgctaagaggatctcctgtccatcagccaggacagtcagctctctcctttcagggccaatccccagcccttttgttgagccaggcctctctcacctctcctactcacttaaagcccgcctgacagaaaccacggccacatttggttctaagaaaccctctgtcattcgctcccacattctgatgagcaaccgcttccctatttatttatttatttgtttgtttgtttttattcattggtctaatt

SEQ ID NO: 64 - DNA, 298 bp, Homo sapien
acattcaccattaagatttgtagtctcatggttttctgtgggattagaagtctgttcagaaggggaaatgcttgcagcattgtccatatctgctagagataatgattctgggtgagaatttagagaattttcctcagaagactcttgatcaaccaaatcaacctcctgagaacttgatgaaatctgttcaccactctgattctgagaatcattttcagaggatggttgttcttcattttccatttcaggatctgtatgagaaagaaacaaacctcatgctacttctctaaaaaaatgt

SEQ ID NO: 65 - DNA, 235 bp, Homo sapien
actataagaacacattaattcaatggaaatacactttgctaatattttaatggtatagatctgctaatgaattctcttaaaaacatactgtattctgttgctgtgtgtttcattttaaattgagcattaagggaatgcagcatttaaatcagaactctgccaatgcttttatctagaggcgtgttgccatttttgtcttatatgaaatttctgtcccaagaaaggcaggattaca

SEQ ID NO: 66 - DNA, 349 bp, Homo sapien
acttcaactttaatttctctgtattttcttcctggaaaaatttggtgttaattttcttgctgatgatttgtgttcgaatgtaatccttcacagctaggcagagcctcatttgctccaaaataaattccactcgctctttcttttccattgacccgtaggtttccacctgtaactcctgtaaaatggaggctgcctctttcacatcaccattttgttcttttatagttgctaatgttttagtcagtcgcgcacgctcaatttcaacataaatcttgccttcggtaaccattcgtagagtatcaattaatcgaagtttgataggaaggtctgtgatttcctcaacataagt

SEQ ID NO: 67 - DNA, 238 bp, Homo sapien
acgatttttcaatgttaaagttcactttcaagtatgatcaataacaagacatcaaatgtaaaaattatgctgtattatcattttctccattgcttcttaaaccactgaaagtaatttcacaattcaccacatttaggcatcttctttttcactttcttcattttttacttctttaggcaacaatggatcaatcttcagtaataaaccttcacttgttgaactacgaaggaaagcacgt

SEQ ID NO: 68 - DNA, 286 bp, Homo sapien
acagacattttatttctattttgaaatgagttatctattttcataaaagtaaaacactattaaagtgctgttttatgtgaaataacttgaatgttgttcctataaaaaatagatcataactcatgatatgtttgtaatcatggtaatttagatttttatgaggaatgagtatctggaaatattgtagcaatacttggtttaaaattttggacctgagacactgtggctgtctaatgtaatcctttaaaaattctctgcattgtcagtaaatgtagtatattattgt

SEQ ID NO: 69 - DNA, 496 bp, Homo sapien
  misc_feature (1)...(496): n = A,T,C or G
acacaatttaaactgaaagttcattgactattatattgccatgaacctcttctgcctgtgttaaagcacagcagggaggcctggtgggtgtgacggccccctacgtcctcctctgcagacggaatccgacggtggatccatacaccggccccatgatcaagatcccgctcggcccacgtaggcctgagtgcttaaccagcacgtgtccacaccggtcaaactgatcttcacaggctgttggtaattcaacactgtcaatgcatctttaagaatttctttatagatgaaagagaatgttctttgttaataaagacttgagccaaccccattgctacttaggaatattgttttggagatttccatcggaagtcactgcgtatacccattctttttttaaggctacttcccataangctcatgttttgaagccactctaacagaagcccaacctctggcgtctaacccttggttcacttctgaattttcagatgatggg

SEQ ID NO: 70 - DNA, 343 bp, Homo sapien
actttttattgggtaaaaatggaattgaacagcaacctcaacataagattttttttctagtagcctcccactgattaaagaagcaagtttgaggtttcatccttcaaaagggggttccgagagagcaccgtagggcttttctcaaatagaaaagccagattttgaaaaaattttaaagataaaataggacatattttgcagatatatatatatatacacaaacacatctccaggtatagagaaccatccagatgttcacttttgaaaatatctaatgatgcaaagttttattcttgaacttggacactgatgccatcaaacaaattaacaaatatatttaagt

SEQ ID NO: 71 - DNA, 393 bp, Homo sapien
  misc_feature (1)...(393): n = A,T,C or G
acttcaacttgtttctgtagaaattgccagaaatgttgatgccttcacagcgtacttaaaaagttttttaaaaaataattaaatgcactactcatctcaatgaaatttttcgttttcctattttctagaactttctaaaaaaggaaacaaagcaaaaacaacaacaaaaaaaacctgtttgacttaaggacacttgctgatcttgacacttgataatactttaagaaatggaaaggttttcctaaatctaatacctgcttaatataatccactttggaagattcatctgaaagaaacatagggtttgatttttaatactaatataaaataatctgccttccaatcaaaacaaaaatgttttcaactgtatacgctnctngnttgtgttttgtt

SEQ ID NO: 72 - DNA, 271 bp, Homo sapien
  misc_feature (1)...(271): n = A,T,C or G
acaatgcaagttcttttgccaagttcacgcttattgtgacagatgtgaatgaagcacctcaattttcccaacacgtattccaggcgaaagtcagtgaggatgtagctataggcactaaagtgggcaatgtgactgccaaggatccanaaggtctggacataagctattcactgaggggagacacaagaggttggcttaaaattgaccacgtgactggtgagatctttagtgtggctccattggacagagaagccggaagtccatatcgggt

SEQ ID NO: 73 - DNA, 460 bp, Homo sapien
  misc_feature (1)...(460): n = A,T,C or G
acttcagttggtgcacaaaatactgtcatttgctcaaagctggctgccaaatgtttggtgatgaaggcagaaatgaatggctcaaaacttgggagaagagcaaaacctgaaggggccctccagaacaatgatgggctttatgatcctgactgcgatgagagcgggctctttaaggccaagcagtgcaacggcacctccacgtgctggtgtgtgaacactgctggggtcagaagaacagacaagggacactgaaataacctgctctgagcgagtgagaacctactggatcatcattgaactaaaacacaaagcaaagagaaaaaccttatgatagtaaaagtttgcggactgcacttcangaaggagatcacaacgcgttaccaactggatccaaaatttatcacgagtattttgtatgagaataatgttatcactattgatctggnttcaaaattcttct

SEQ ID NO: 74 - DNA, 151 bp, Homo sapien
acccggaagagtcacatgaagatgatctgttttaaaatgtgaggcgattattttaagtaattatcttaccaagcccaagactggttttaaagttacctgaagctcttaacttcctcccctctgaatttagtttggggaaggtgtttttagt

SEQ ID NO: 75 - DNA, 415 bp, Homo sapien
  misc_feature (1)...(415): n = A,T,C or G
ccctgtgggtttattacctatgggtttatatcctcaaatacgacattctagtcaaagtcttggtaatataaccaatgttttcaaatgtattctgtcatacaaagagcagatttttattgaacttgtgcaataactatattaccatacaatataaatattcatgaatagtttcccaagtctggagcgaccacatagggagaaaatgtaaatgtctcaatttttgttcacaaaagtatattttatcaaattgctgtaagctgtggatagcttaaaagaaaaaaagtttcctgaaatctgggaaacaagacatttaaagaatcagcaaaatttcaaataaaaaattatggaaaatattatcctcattagttcattttagtcccnntgaaaattaattattntctctgcttgatcttgg

SEQ ID NO: 76 - DNA, 343 bp, Homo sapien
acagttggtgaaggaagaggtaacaaaaaatgctaaatattttatccatgaaaatgacttccagaaaaggaagaatatgaaccccagaccgaaggggaaaagatagttaatagtattatctaacctggttggtatttgtaatgaatggtgattttaattagtcattagccataatgatgtttatttacagtataactcctgaatgctacttaaataaaccaggattcaaactgcaagccagccaggccgttcattatttaaaacgttttaatcggggcttccgggtagaaggtggagcggcagggtgtaattgggttgatgggtgggacctgtcttgaccatc

SEQ ID NO: 77 - DNA, 446 bp, Homo sapien
  misc_feature (1)...(446): n = A,T,C or G
gctacagcttggactattttttctaaatttttagcattagtccatttctgctgctaacaattgaatccagaaatctactttctccatcttccactgttagtgccagtgagcaatactgttgtgcaacaaaaatgtcactttatctcagtgtgaatgagtagtctaaattccctttctaccattgatttaaatatatatattggtaagagagactgcccatgtgtttagaatagaattttttaaatgaaatgatcaacgggtggaatttgaaatatattcttctacaaaagagatttctttcccttttatattttgatgattgttttcttaagattaagatatgttcttgctcttttataagattatttaaattatgttttncctctgattttttttcaccattgnatttactaagttattggatttacatgaaatctggcacttta

SEQ ID NO: 78 - DNA, 306 bp, Homo sapien
  misc_feature (1)...(306): n = A,T,C or G
caagcttttttttttttttttttttttttttgctcacaaaagtatattttatcaaattgctgtaagctgnggatagcttaaaanaaaaaaagtttcctgaaatctgggaaacaagacatttaaagaatcagcaaaatttcaaataaaaaattatgaaaatattatcctcattagttcatttagtcccatgaaattaattattttctctgcttgatcttggnggacagtttcatgaanctgncagttagttcattaaagttttggaaattntnaaacagngcagnggtntcaaaaacttgtnttcaa

SEQ ID NO: 79 - DNA, 553 bp, Homo sapien
accagccaacaggaagaccacggggaagaccagaaggaaggagaaatcctatatactcactaatagataagaagaaacaatttagaagcagaggatctggcttcccatttttagaatcagagaatgaaaaaaacgcaccttggagaaaaattttaacgtttgagcaagctgttgcaagaggattttttaactatattgaaaaactgaagtatgaacaccacctgaaagaatcattgaagcaaatgaatgttggtgaagatttagaaaatgaagattttgacagtcgtagatacaaatttttggatgatgatggatccatttctcctattgaggagtcaacagcagaggatgaggatgcaacacatcttgaagataacgaatgtgatatcaaattggcaggggatagtttcatagtaagttctgaattccctgtaagactgagtgtatacttagaagaagaggatattactgaagaagctgctttgtctaaaaagagagctacaaaagccaaaaatactggacagagaggcctgaaaatgtgacaggatcatga

SEQ ID NO: 80 - DNA, 221 bp, Homo sapien
  misc_feature (1)...(221): n = A,T,C or G
actgcttgttctctgnggaggagatgattaaaataaaaatcccagaaggacaggaggattctcaacactttgaatttttttaacttcatttttctacactgctattatcattatctcagaatgcttatttccaattaaaacgcctacagctgcctcctagaatatagactgtctgtattattattcacctataattagtcattatgatgctttaaagctgt

SEQ ID NO: 81 - DNA, 466 bp, Homo sapien
actttgaatatggagtagtttacagctatttttttttcttactggtaatcttaactaatatgattcccttgttagagagcctctcactcccccacccccaaaaatgtctactattcatgacagtaaccaattattctggacaaattgcttctttttaatttgagctatctgccatggactttctaaaatggaaacacagcctgagtgtatcttagggagagtttgattgaaaaaatccaaatcactatccatatagatcatggatataaagagatacctgatttttattaaaaagatactttttcaaatttaagagttaatcttggaaatttggaacaagtaaaggggcaagtaaaccttttgatgaaatataaaaggaactcattgcatgaagttgactatcaaattctgtgatgtgtggcttcttaaaaatattctcagtgtcttttgtgtgcgtgcagcatgt

SEQ ID NO: 82 - DNA, 468 bp, Homo sapien
  misc_feature (1)...(468): n = A,T,C or G
acttcagttggtgcacaaaatactgtcatttgctcaaagctggctgccaaatgtttggtgatgaaggcagaaatgaatggctcaaaacttgggagaagagcaaaacctgaaggggccctccagaacaatgatgggctttatgatcctgactgcgatgagagcgggctctttaaggccaagcagtgcaacggcacctccatgtgctggtgtgtgaacactgctggggtcagaagaacagacaaggacactgaaataacctgctctgagcgagtgagaacctactggatcatcattgaactaaaacacaaagcaagagaaaaaccttatgatagtaaaagtttgcggactgcacttcannaaggagatcacagcgcgttatcaactggatccaaaatttatcacgagtattttgtatgagaataatgttatcactattgatctggttcaaaattcttctcaaaaaactca

SEQ ID NO: 83 - DNA, 77 bp, Homo sapien
  misc_feature (1)...(77): n = A,T,C or G
actacactgacntgatttgcagtcntgtttttcttcctaccccttaaggctacaaaattctgttgcaaatgcattgc

SEQ ID NO: 84 - DNA, 202 bp, Homo sapien
actttcttaatgggctgaataaattaattacaattaagtttgctttacatcctgttgaggacctctttgcagccccaggacctaacaatatctggcaggctccaagaatgctcatcaggtgaaatgatggcagaacatttaaagtaaggagccagttacttcagcttaagtcattcagagccaaacatctgaagaacgacca

SEQ ID NO: 85 - DNA, 349 bp, Homo sapien
acgtggacagccttaggataagctgacattatagatgcagctaggtaggcaacaaaccatagtgccaaatggaaaaagtatatttgcaaataaattttaaaaactaagttaattttttataattaaatacagaaaatatactgatttgctaaaataaataagatgtgatgtattaacacttcactataaagaatgcataccagaacatttataaacagtgagtgagttttattaagaatagtttactacaataaacgctggctaaatagaagtgcattttgtgaagcactatgggtggtatatgttttgccacatactcttgttaccttgaggtagataacacatgtgt

SEQ ID NO: 86 - DNA, 397 bp, Homo sapien
  misc_feature (1)...(397): n = A,T,C or G
actctttatgaaagtctgaaattataaatagaaaagaaccatcaagatactttttaaaaacctaacattgtatattctgaaccacatgctaattaaaattcgttgttcattacacagcaccaatacccatgatacatcttacaagaacaaaactaacatatttggaaaaaagagaaaaaaaaattctgcttcatttacgaatgttgccaaaggaggcaagttttcaactgaaaacaaaacataaaggtctatgtggatgcagccaaatgtttntccatttaggaaaatcatcataaaaggtggcagcactttttttgcttgttaactattatttacttataactggctgcaccaacatttcatctcaattttttggagngtttcttctgatcaatcc

SEQ ID NO: 87 - DNA, 520 bp, Homo sapien
acatccaaactactgtgtaaacacagaacacacctccaaattatgcttgtgaactaaatgtttcactaaagttcagaaaagtttacaaatttgcttatttatgacatacatttgtagatttctctaatcctttaaatcaaaagaaaaatgaacaccaataaaaaaaaaatcagaagggagaggaaaaaaaattaaatctaatggaaaatattctcttccattaatgtcagagtcaccaaaaacagacaataaaatttacacataaaattgaaaatatcatgatagtgtttacaaatgcacacaactttgagcaaagctttacaaatccttcataccatacaaagcaaatgagaaaataatgtcaattcatttctaccccaaacctagttcttaggagaaaattcgcaggaagagaggtatgagtagtttcacagaatacattttcaagaattttttaaaaactgaaactccaatgcccagaacaagataaacagtatccttagcagttagcactgttaat

SEQ ID NO: 88 - DNA, 257 bp, Homo sapien
  misc_feature (1)...(257): n = A,T,C or G
acctgtgggtttattacctatgggtttatatcctcaaatacgacattctagtcaaagtcttggtaatataaccaatgttttcaaatgtattctgtcatacaaagagcagatttttattgaacttgtgcaataactatattaccatacaatataaatattcatgaatagttttcccaagtctggagcgaccacatanggagaaaatgtaaatgcctcaattttttgttcacaaaagtanattttatcaaattgctgta

SEQ ID NO: 89 - DNA, 419 bp, Homo sapien
acctgctaaactgttgttttgaccaagtccatgttttcaaacctgctactagcaaggcaggaaactccgaagtctatgtggtttgcctccactataaggggagagaggccatccatcctctgttatctaagatgaccttgaattttgggactgaaatgaaaaggaaagccctttttccccatcatgtgattcctgattcttttcttaagagacatgaagaatgttgtgtgttctttcataaatatcagctagagactatttctgaaaacattcgtctatttgagtgcatgggaaaggcggaacaagaaaagctgaataatttaagggattgtgctatacaatattttatgcaaaaatttcaactgaaacatctttccagaagtaattggctagtaaaaaaatctagtattggttgtagt

SEQ ID NO: 90 - DNA, 310 bp, Homo sapien
agagccccgaattaataccaatagaagggcaatgcttttagattaaaatgaaggtgacttaaacagcttaaagtttagtttaaaagttgtaggtgattaaaataatttgaaggcgatcttttaaaaagagattaaaccgaaggtgattaaaagaccttgaaatccatgacgcagggagaattgcgtcatttaaagcctagttaacgcatttactaaacgcagacgaaaatggaaagattaattgggagtggtaggatgaaacaatttggagaagatagaagtttgaagtggaaaactggaagacagaagt

SEQ ID NO: 91 - DNA, 409 bp, Homo sapien
acctgtgggtttattacctatgggtttatatcctcaaatacgacattctagtcaaagtcttggtaatataaccaatgttttcaaatgtattctgtcatacaaagagcagatttttattgaacttgtgcaataactatattaccatacaatataaatattcatgaatagtttcccaagtctggagcgaccacatagggagaaaatgtaaatgcctcaatttttgttcacaaaagtatattttatcaaattgctgtaagctgtggatagcttaaaagaaaaaaagtttcctgaaatctgggaaacaagacatttaaagaatcagcaaaatttcaaataaaaaattatgaaaaatattatcctcattagttcatttagtcccatgaaattaattattttctctgcttgatct

SEQ ID NO: 92 - DNA, 466 bp, Homo sapien
acagtgaaaaacaaactaatataaagcattccagttgataaaaacctcctcaggcttatggtttgttttccaaggaaattatgtttcaatgtaaagtttgaaatactccagacatacattccatgtaggttttgggtgccaatgttaaaatttcaaattttgcatgcaaggcttagcaaagaaacactggcagaattccagcatttgcaaaattctaagttttggtgaatattgtaaatattacaattggtattagaaagccatgatgaatccagaattaagagaaaacccatttcataaatattttgtttgattaaaaaataccaggcttaccatgttctaaataactcaagaaaatatctttaaaaaaaaaaggactgcaatttaacagtaatctgtatatctttagctgccattaaaaaaagaaaaaagaacaaaccaaaaacaatgaaaatgtttacaactg

SEQ ID NO: 93 - DNA, 487 bp, Homo sapien
  misc_feature (1)...(487): n = A,T,C or G
acattttatggctcccagagcatatattcagttggtgcatgttgtggaagggggaattggaaattaaatgaaaacctatgactttggtcatgtcaatctgtaagacacatcagtaaaagggtattatgctctgttggttttgtttttttgttttgcttttttttttttttttcttttttgttttttggngatgtggcttaaatgcaatagtttcttttttgggacatatttctgccaattaaagactagaagggcacaactttttttttaattaccatagagaagatacattaaaaaaatcttctgatgttttgtagccataactaaattatggtaaaaatgtgcactattgtgaaaaggagcaacgtagttttgggttttttgttgtttgtttgttttgctttgttttttaagagattaaaatgtttctggataaaggattancttctcgaagtgtccatcattctgtgtanaagcttaaatatgt

SEQ ID NO: 94 - DNA, 451 bp, Homo sapien
  misc_feature (1)...(451): n = A,T,C or G
acgtgaaccacaaagtgtataccaggcatatgacatggatccccctggggaaccaggctgatctctttccagagggcactatccgaccagtgcatgatgatatcctcatcgctcagctgcggcctggccaagaaattgacctgctcatgcactgtgtcaagggcattggcaaagatcatgccaagttttcaccagtggcaacagccagttacaggctcctgccagacatcaccctgcttgagcccgtggaaggggaggcagctgaggagttgagcaggtgcttctcacctggtgttattgaggtgcaggaagttccaaggtaaaaaggtggccagagttgccaacccccggctggataccttcagcagagaaatcttccggaatgagaagctaaagaaggtttntgaggcttgcccgggttcgagatcattatatcttctctgttgagtca

SEQ ID NO: 95 - DNA, 107 bp, Homo sapien
acaaaaaaagcacattcctagaaaaaggtattggcaaatagtaaaaatgggaggtcaaaagcaaaaaaaaaaaaaaaaaaaccaaaccaaaaaaagaaaaaacccac

SEQ ID NO: 96 - DNA, 328 bp, Homo sapien
acaacagtggtttgggaatctgcaaataaatgctcatttaagaaaaactactgaatatgacagcatcagcccaaaccgggacttccagggccatccagatttgcagaaggacacatcaaaaaatgcctggactgatacaaaagtcaaaaagaactctgatgcttctgataatgcacattctgtaaaacagcaaaataccatgaaatatatgactgcacttcacagtaaacctgagataatccaacaagaatgtgtttttggctcagatcctctttctgaacagagcaagactaggggtatggagccaccatggggttatcagaatcgt

SEQ ID NO: 97 - DNA, 499 bp, Homo sapien
  misc_feature (1)...(499): n = A,T,C or G
acctaaagcacagctaggcagctggggaaaaggcagcagtggtggagcaaaggcaagtgagactgatgccttncggtcaagtgcttccagtttaaacagattctctgccctgcaacctccagcaccctcagggtccacgccatccacgcctgtagagtttgattcccgaaggaccttaactagtcgtggaagtatgggcagggagaagaatgacaagccccttccatctgcaacagctcggccaaatactttcatgaggggtggcagcagtaaagacctgctagacaatcagtctcaagaagagcagcggagagagatgctggagaccgtgaagcagctcacaggaggtgtggatgtggagaggaacagcactgaggctgagcgaaataaaacaagggagtcagcaaaaccagaaatttcagcaatgtcagctcatgacaaggctgcattatcagaaagaggaaactggagaggaagtngaaatctatcattgatgaat

SEQ ID NO: 98 - DNA, 489 bp, Homo sapien
actcatgcccgactgtctaccaggcacacagactttgaggagagggagtatgtcgtcttgatccgcatcaatgatgggggtcggccacccttggaaggcattgtttctttaccagttacattctgcagttgtgtggaaggaagttgtttccggccagcaggtcaccagactgggatacccactgtgggcatggcagttggtatactgctgaccacccttctggtgattggtataattttagcagttgtgtttatccgcataaagaaggataaaggcaaagataatgttgaaagtgctcaagcatctgaagtcaaacctctgagaagctgaatttgaaaaggaatgtttgaatttatatagcaagtgctatttcagcaacaaccatctcatcctattacttttcatctaacgtgcattataaatttttttaaacagatattccctcttgtccttttaatatttgctaaatatttcttttttgaggtggag

SEQ ID NO: 99 - DNA, 496 bp, Homo sapien
acaaatgatgaccaataattttatctttcttcctttgaatatactgtaaattctatgaaaaattcatttataaaaacaaagcaaagaatagcataaattttattttctttcacaatgttatattttaatagaagaaaaaaactacctttctgataactgtaacctaagtaaaacaaatattttacatataatttgaggcaaagtaatgagtttcttgaatcaactggagaaattagtcacattacctatgtcatgcataaatgatggtaagaagaaaaaaaaagcatctgatcatgtatgagaactgtctctgttcaaattatgagaaataaaatgaaaattgctaaagggagaaaatgaataaaatatgatttaaaaaaaaccatatgggaattgcatagatgagaaaaaaattttcattctagggatctaaaagtaatgtttttagctttaaaaacatacacacacatatataattgagacatgtctatcatct

SEQ ID NO: 100 - DNA, 423 bp, Homo sapien
  misc_feature (1)...(423): n = A,T,C or G
accaaagcattaccgcatggtagagaacacactcgattaaaaatgttaagctatctgaaaaataaaatgtgcaagtcttcaggatggcacaaaacaaaggttaatgcttcttggggcacatttcttagagggcttgctgagtgtgtaaatataatcgacttttgtttgtgttacatgacttctgtgacttcattgaaaatctgcacaattcagtttcagctctggattacttcagttgacctttgtgaaggtttttatctgtgtagaatgggtgtttgacttgttttagcctattaaatttttattttctttcactctgtattaaaagtaaaacttactaaaagaaaagaggtttgtgttcacattaaatggttttggtttnggcttcttttantcangctttctgaacattgagatatcctg

SEQ ID NO: 101 - DNA, 271 bp, Homo sapien
  misc_feature (1)...(271): n = A,T,C or G
gctctagagggggtgctatagggtaaatacgggccctatttcaaagatttttaggggaattaattctaggacgatgggcatgaaactgtgatttgctccacagatttcagagcattgaccgtagtatacccccggtcgtgtagcggtgaaagtggtttggtttanacgtccgggaattgcatctgtttttaagcctaatgtggggacagctcatgagtgcaagacgtcttgtgatgtaattattatacgaatgggggcttcaatcgggagt

SEQ ID NO: 102 - DNA, 527 bp, Homo sapien
  misc_feature (1)...(527): n = A,T,C or G
acatcaagtcannaatgatgttgacatgagttggattcctcaggaaacattgaatcaaatcaataaagcttcaccaagaaggttgcccaggaaacgggcacagaagagatcagtgggatctgatgagtaaatgttcctttgtgcaacaattcggtctttacttaacctgccctaatatttttcggcctgatgggaattagtgcagagaagccatgtcaccatagaaggcaactcctacttgtgtgtggactgagcaatcagagtctgtggcgataatattgctgaaaatgcactgcattcatttttctaaagtaacaaatttggttttttttttaaaccattaaaatctatgtgtgtgcgtgtgtatgtatgtgagcagttggtcttaccaagaatcattgttgagctacctgaaaacangtctttngaatactaaatataaatgctgttgnctcttcctttttgacatttttctgatttttttcccccaaaactcanttaaatatttacccactatgattattgat

SEQ ID NO: 103 - DNA, 395 bp, Homo sapien
actcagaaaaacatctaaagctgttggagaagagggactcatataaatagttggattgcgttttgctttttatttctttataaaaatatgtcaaaaacagtttttaattttagaaatcttatacttgaaagaaacctcaattatcagtggctttatgaagtaaagttaaaaacaaacataggaaatgtgaaaatatttgtgtttgttttgtctgactaacttgctgctaaatgctatctttaggtgtgtgaaagttctttgatatgttattgtccttttacatcttgttaaatagccattgcttttgagaatcagatagtgtgttgtttaggggttaattgtgtctatatctttcaaaaacttttatattatgtattataagaagttacagtagt

SEQ ID NO: 104 - DNA, 489 bp, Homo sapien
  misc_feature (1)...(489): n = A,T,C or G
acttgaaatttaactattaaaaaagttggaggaactcaaactttgaagttagggctccctttctccagataaagcacattgcctggtttattgtaaggcacttagaacatgtaaccaaaaacactcaatttaggaataggaatgattgttttacagctaagtgcgctctcagagtcttttgttttacacccctctcaagtttacctttagatatttttcttgttgtttaatattttgtgacagatttggcaacttttaaaaagttgtttgaattgaatagtgcataaaattaatagatgtttttcagaaaatccattattaagagtagaggaatgaggagaaatattcgttctaaagagaatcaaaaccacaatgagagattgtcttacccccgttagaatgacagttaccaaaagacagtaacaaatgctgacgagaatgcagaggcaggaacgtttaaaacactgttagtgggnaatgtagacttgt

SEQ ID NO: 105 - DNA, 462 bp, Homo sapien
acacttttgttacagttacatatatgaatagttagcagaggagaaactcctccgttgttcctacaccaagggaaaaaatgtaaggactgtatagctcatgaataatattaacatttttctatcacaaaatattgataaaattggaattgtatcaattcatgttatggagcttaacattttagccgaaatattaagataatataaataaggcttttagcttcatatcaagacctatttgaacacttctagaaaagaacattaaaagttttttcctcatttatggtttgatttagtgtagtgcctcaactgttcttaatggtgtcttagtataatgcataattattagaatataattataaggcattacagaattttatgtggatacttgcaaagatatttcagtccaaaacttcaaattacacacccaaatatgtttgttgccttaatctatacttggacaaa

SEQ ID NO: 106 - DNA, 279 bp, Homo sapien
acaagaaacaaatgggtgtggttgtatcccaataaaatgttagcaaaaggcctctctggcttgccaatcactgccttaaaccataaattttcatatgagcctggttttattttcatttttgttgtaataaattactcagtacaccaccattcaccacaggatttatgatttaccaattacatactccaccattttggcaaaaggatgaaattcttaaaactgtttataaacctaatatagtaaagactgtatacatctccatattgcacatttttatgt

SEQ ID NO: 107 - DNA, 411 bp, Homo sapien
acttcatgctgtctacactaagagagaatgagagacacactgaagaagcaccaatcatgaattagttttatatgcttctgttttataattttgtgaagcaaaattttttctctaggaaatatttattttaataatgtttcaaacatatataacaatgctgtattttaaaagaatgattatgaattacatttgtataaaataatttttatatttgaaatgttgactttttatggcactagtatttctatgaaatattatgttaaaactgggacaggggagaacctagggtgatattaaccaggggccatgaatcaccttttggtctggagggaagccttggggctgatgcagttgttgcccacagctgtatgattcccagccagcacagcctcttagatgcagttctgaaga

SEQ ID NO: 108 - DNA, 210 bp, Homo sapien
actacctgttgacctggaattttagtgattctgggaaagttttccagacaaagacaccaatagagtgaagggttttttccccaattactattttattgttttttaaaatgcctttttaaaacttgtgtgatgtggcaaaatagtcatatgttcaattaatttatattttattcattccttttcaattctggttattatgtaacctcaagt

SEQ ID NO: 109 - DNA, 475 bp, Homo sapien
acagcattctggaataaagcaagagtgttcattcacacacacagtagcttcaaaactgttcgatctgtttgttcccatgtagttttctaaagatggaaaaaaaggactttggtcatcaagactactgtggccatattagattactggaacatctaagcatcagtgtgtgaccatgcgaacaaaagacttcggggagtgtctatttttaaaaaggtttatgtgtgtcgaggcagttgtaaaagatttactgcagaatcaagcccacttttaggcttaggaccaggttctaactatctaaaaatattgactgataacaaaaagtgttctaaatgtggctattctgatccatagttgttttttaaagaaaaaaaatgtatatacagaaagagtataaaagtttgtgaatttaatgcaaattagcttccagtcttcacttcccaaatacttgatttatagttttgactcctttacattt

SEQ ID NO: 110 - DNA, 443 bp, Homo sapien
acaaaaaaaaccttacataaattaagaatgaatacatttacaggcgtaaatgcaaaccgcttccaactcaaagcaagtaacagcccacggtgttctggccaaagacatcagctaagaaaggaaactgggtcctacggcttggactttccaaccctgacagacccgcaagacaaaacaacaggttcttgccagcctctagagaaatcccagaacactcagccctgacacgttaataccaaggggaacagttaacttcaatacaaggtcaaaatcagcaacaagttctacaatccagtgctgatatcagatacaagcttcaaggacaatttcttttcgaaggcttattccagtttcgtgaggctagcatgaggtgtgtgcatttgccaggggcaaatttctattctcaattaacccatgcagcaaatgctacgcatctgctgagt

SEQ ID NO: 111 - DNA, 268 bp, Homo sapien
acagttatgctcagatgaacactggacccatgtggcagggtcaagcaactagaacatgattcagaaatcagtgaaagatacacttggacaggaccaagaggcatttcactgccatgaaacaaggcaggaagggattctaatacacacaccaggaagcactcctgcccctcagaggtcaaggagctgatcctatattggtatgaggaatggcttattttctgatgaccacatgtgggactatttcaaccgccacaagaaaccccagaag

SEQ ID NO: 112 - DNA, 469 bp, Homo sapien
actactaattaatagaaaatcattcaaccaagagaagagtcaagtgaatatcgtttgtttatttgctagtgagtttctttgtaacgttgattttattaaatgataatatttggttagtatgtcctatgttaataaaaatgaacaaaattaattttgctatgttcaggtgtcttgataaaataacaatgctccagtgttgttgcttacatttagcactaaattttaacacagcgtcagtgagtccaggttttaacttcttcatgcctggatgggataaaatgtaattcattgttaaattaattcatatttgtatttattaatcactgtgacaacattaaccatttgttcttaccaggaagtggtcagattatcatctgagttacagttagactggctaagtttggtattagatcaaggggaatgtccagtaaacagagaggtaagcatgatggaaataatgaagtggggt

SEQ ID NO: 113 - DNA, 388 bp, Homo sapien
  misc_feature (1)...(388): n = A,T,C or G
ctttttttttttttttttttttttttttttttgggggtgaggtaaaatggctgagtgaagcattggactgtaaatctaaagacaggggttaggcctntttttaccagctccgaggngattttcatattgaattgcaaattcgaanaancagcttcaaacctgccggggcttntcccgccttttttcccggcggcgggagaagtanattgaanccagttgattagggngcttanctgttaactaagtgtttgngggtttaagtcccattggtctagtaagggcttagcttaattaaagtggctgatttgcgttcagttgatgcanagtggggttttgcactgagcancgatgagagccttgaaggccctccagttttcangatacgtgt

SEQ ID NO: 114 - DNA, 195 bp, Homo sapien; identical to SEQ ID NO: 8

SEQ ID NO: 115 - DNA, 399 bp, Homo sapien
  misc_feature (1)...(399): n = A,T,C or G
acctgtgggtttattacctatgggtttatatcctcaaatacgacattctagtcaaagtcttggtaatataaccaatgttttcaaatgtattctgtcatacaaagagcagatttttattgaacttgtgcaataactatattaccatacaatataaatattcatgaatagtttcccaagtctggagcgaccacatagggagaaaatgtaaatgtctcaatttttgttcacaaaagtatattttatcaaattgctgtaagctgtggatagcttaaaagaaaaaaagtttcctgaaaatctgggaaacaagacatttaaagaatcangcaaaatttcaaataaaaaattatgaaaatattatcctcannagttcatttagtcccatgaaattaattattttct

SEQ ID NO: 116 - DNA, 426 bp, Homo sapien
  misc_feature (1)...(426): n = A,T,C or G
nnaaagtatgnattgaccatgagatttcccagtgtttggtgcttaatgccgnttattttatttaagctaagaatgcatatgtaacccatgcacataaccagtngctactatactaatctggttgagcatgaactgatcaagatatcaaaacttatcaaaactagcctgaagctgatgaaactgttaacccactaattgccttaatcttaaagctgttttttaagcatacttaaataatgtatgaaagnatgtataaagtttgaaggataagttattagtgttctgcanagcaataatgcctttttctatttcatcaaatcaaggtcaaaaattcatcttttcaagattaaaaagctctcttaatggaaatatttnaattttgcttatataaaaagcactatagccatgttttccaaaaagtataaa

SEQ ID NO: 117 - DNA, 215 bp, Homo sapien
ttttttttgctctagagggggtgctatagggtaaatacgggccctatttcaaagatttttaggggaattaattctaggacgatgggcatgaaactgtggtttgctccacagatttcagagcattgaccgtagtatacccccggtcgtgtagcggtgaaagtggtttggtttagacgtccgggaattgcatctgtttttaagcctaatgtggggac

SEQ ID NO: 118 - DNA, 397 bp, Homo sapien
  misc_feature (1)...(397): n = A,T,C or G
gtatagnatttacattctcttttaggtagaagaggcaattttacccttatttcacatggttagaaatttaaagcaagatcatttacccaaggataggtgtttggtaatgttgaaggagttagtctggcttcatgttttacatcttcaactaaaatcccatactatctgcttggatttggagagccaaaaaataaagctgattgtcatgtgattaaatatctgatcaacaggtatgaatataacttaaatcagcatatttttgccatggtaataaattgtcctataaactatttatatatttttgttcttcataattatcactaataagcatcagtttgttgtttttaaaaggatatttaagtgagcattttctagttcatatgaaaataaccatagt

SEQ ID NO: 119 - DNA, 356 bp, Homo sapien
accaagtattccagtggaagatgatgaaagccagaataacaatttactaccttctgatgaaggcctgaggatagacagaatgactcagaaaactccttttgaatgcagccagtctgaggttatgtttctgagcttggacaaaaagccagagagcaagagaaatgaggaagcttgcaacatgcccagttcttcttgtgaagaaagttggttcccaaagtatatagttccatcccaggacttaaggccctataaggtaaatatagatccttcttcagaagctccagggcattcttgcaggagcaggccagtggagagcagctgttcctccaaattttcctgggatgaatatgaacagt

SEQ ID NO: 120 - DNA, 294 bp, Homo sapien
  misc_feature (1)...(294): n = A,T,C or G
actcaccaggggtgtggtcctatgggtgacattcttgctccatcatttcttacccaggtaaccttgagtatggcgcctaaatcctctcttcctttcaaattgcctggtctgtaaaatggatgcagtgaatggtagctatgccacaggtgttttgtgtgagaattaaatgagaggagttatatcaataacacttanaggcatgcggtgcctatagtgagggcttgttttatgttgtcgtttaaccctttctttctcagccctcccccactccacatcccctcccactggcaatgt

SEQ ID NO: 121 - DNA, 467 bp, Homo sapien
acaaagcagcaactgcaatactcaaggttaaaacattagaaaagcatttgtgtgacaggtatattacagtattatcaaaatattacattttcagacttacttagcagataatcatccaccagagcttaaatctttaaattatttccatagtcttaaaaaatatgtaatgtcagaatgcatataaaaagaatgtaaaaggaaacctaaaatacaaatggaataatgtaacaaataaatatttgatttcagtaactgttaataatcagctcaacaccaccattctctctaaactcaatttaattcttataggaataatgaactgtcaaatgccatggcataattatttatttccaagctatcatcaatgattagaactaaaaaaaatttggcataaaaaaatcacaattcagcataaataaagctatttttagcttcaacactagctagcatctctaagaattgttgaa

SEQ ID NO: 122 - DNA, 375 bp, Homo sapien
acgactttttcgagttggcttaggcagaattctcctctgagcgataaagacgacatgcttcccactgaactttttctccaattcgcgtaaggctcagaaaaatcctgcgaagaaaaaaacttctgaggtaataaataggattatcccgtatcgaaggcctttttggacaggtggtgtgtggtggccttggtatgtgctttctcgtgttacatcgcgccatcattggtatatggttagtgtgttggttagtaggcctagtatgaggagcgttatggagtggaagtgaaatcacatggctaggccggaggtcattaggagggctgagagggcccctgttaggggtcatgggctgggttttactatatgataggcatg

SEQ ID NO: 123 - DNA, 451 bp, Homo sapien
actatactctgtattctcacaaatagagaagactaatattgcagacctggtgacagctctgattgtccttttggttgtatccattgttaaagaaataaatcagcgcttcaaagacaaacttccagtgcccattccaatcgaattcattatgaccgtgattgcagcaggtgtatcctacggctgtgactttaaaaacaggtttaaagtggctgtggttggggacatgaatcctggatttcagccccctattacacctgacgtggagactttccaaaacaccgtaggagattgcttcggcatcgcaatggttgcatttgcagtggccttttcagttgccagcgtctattccctcaaatacgattatccacttgatggcaatcaggagttaatagccttgggactgggtaacatagtctgtggagtattcagaggattttgctgggagtacctc

SEQ ID NO: 124 - DNA, 495 bp, Homo sapien
  misc_feature (1)...(495): n = A,T,C or G
accctcttcaagaatcggatggatgtcgttttgaagggcgacaatcttcctcagtatagaggggtgaacattcggagattgctcaacggtagcatcgtggtcaagaacgatgtcatcctggaggcagactacactttagagtatgaggaactgtttgaaaacctggcagagattgtaaaggccaagattatgaatgaaactagaacaactcttcttgatcctgattcctgcagaaaggccatactgtgctatagtgaagaggacactttcgtggattcatcggtgactccgggctttgacttccaggagcaatgcacccagaaggctgccgaaggatatacccagttctactatgtggatgtcttggatgggaagctggcctgtgtgaacaaagngcaccaaaggaacgaagtcgcaaatgaactgtaacctgggcacatgtcagctgcaacgcagtggcccccgctgcctgtgcccaaatacgaacacacactg

SEQ ID NO: 125 - DNA, 277 bp, Homo sapien
actgtgggttgggggccttggatcccaaataaatgagtagttcctctgcagtctaagctgaggcatggatcagggctcagggaatgggagtgaggtgagtggcaggggagacacggggtatttttggcaaggcagtgtgtgtggctgtgtgtgtctgcacgggactcaagagacccactggggggctgtgcgtgtgcatatgcgtgagatacacaggtgaattctaacaggccgtgtgtgtgagcgagcacgtgttgggacctcagatcctgagggt

SEQ ID NO: 126 - DNA, 229 bp, Homo sapien
accttgcagctgacagataataggcaggacatgttagttataaagtagttacagcctaattcacaaaagttaccaactgtttctctttctagaaagaagcaagaagttaagaaattccttgaattagcgcctggtgtgtcaggtgggagtgcagaggagggctgttagagcagtgtcaaaaggaccctggtgggccagacgggttggacatcgttaataatcatagttg

SEQ ID NO: 127 - DNA, 493 bp, Homo sapien
acactattacaaagtagtggttctctgtatgtctatgtgtatatatgtatatataaaactatacagatacatgtgtgtatataaacatacatatgtatatatacacacatatacttaattttaaagttaatcaaatggttatcaaaaattaatatacaacaaagattcctgggaaggtaatgcttatataaaataaggccatgtttctaaaaatccctcaaatcagtccaagataagatttttaatgaagaacataaaggttaaagaaattctttctctccaggttagctgtttttccctacttgttttcttcttgctttttcctgttgttgtccatattaaacttctttgtgctcttaaaggcccgccatcatgtgaagtggccacgccccttatggacaaagtcaagccaccaactcccaaatgtatcagtgcagctgcttcagaggaaatcactgaaaaataaagaaaaaccatccatgcatggctgcat

SEQ ID NO: 128 - DNA, 181 bp, Homo sapien
cgcctgcccagtgacacatgtttaacggccgcggtgcctctaatactggtgatgctagaggtgatgtttttggtaaacaggcggggtaagatttgccgagttccttttacttttttcaacccaacacaggcatgggttgacagtgagggtaataatgacttgttggttgattgtagatatt

SEQ ID NO: 129 - DNA, 491 bp, Homo sapien
ttttttttagaggagacacctgctaggtgtaaggagaagatggttaggtctacggaggctccagggtgggagtagttccctgctaagggagggtagactgttcaacctgttcctgctccggcctccactatagcagatgcgagcaggagtaggagagagggaggtaagagtcagaagcttatgttgtttatgcggggaaacgccatatcgggggcaccgattattaggggaactagtcagttgccaaagcctccgattatgatgggtattactatgaagaagattattacaaatgcatgggctgtgacgataacgttgtagatgtggtcgttacccagaaggttgcctggctggcccagctcggctcgaataaggaggcttagggctgtgcctaggactccagctcatgcgccgaataataggtatagtgttccaatgtctttgtggtttgtagagaatagtcaacggtcggcgaacatcagtgggggtga

SEQ ID NO: 130 - DNA, 413 bp, Homo sapien
acaaaaaacccttgagattaatttttttctaaaagaagaccttaccaaaaataacttttaaaaaatctgtcaaaccatatgatagacctgaatattttccttaagactgtaaactttttttctgaaaacaattataaaaaagtagtttataagtaggattatttttctttaaaattttccaagatcatattacttgacaaataagtgtcattttgaaatttaaaacatgattttttcctaataaaattattagttattctgacatcttattaacagatcttagttgaattccacttaatttccctggggacagctgagacactgcatttttccaaatagtcttaaaaagttaaagataggcattatttaaaggagtgtcttacagtgaaaaaaagaaatcattcaaagaaaac

SEQ ID NO: 131 - DNA, 203 bp, Homo sapien
accgctgcgttactcggaaccgccgggccgaacagcatgacgtccgctttggagaactacatcaaccgaactgttgccgttattacatcagatgggagaatgattgtgggaacactgaaaggttttgaccagaccattaatttgattttggatgaaagccatgaacgagtattcagctcttcacagggggtagaacaagtggt

SEQ ID NO: 132 - DNA, 256 bp, Homo sapien
acctgtgggtttattacctatgggtttatatcctcaaatacgacattctagtcaaagtcttggtaatataaccaatgttttcaaatgtattctgtcatacaaagagcagatttttattgaacttgtgcaataactatattaccatacaatataaatattcatgaatagtttcccaagtctggagcgaccacatagggagaaaatgtaaatgtctcaatttttgttcacaaaaagtatattttatcaaattgctgta

SEQ ID NO: 133 - DNA, 535 bp, Homo sapien
acagagcccgaccccctgcttgccactctagaaaagcaagaaattatagagcagcttctatcaaatattttccacaaggagaaaaatgagtcagccatagtcagtgcaatccagatattgctgactttacttgagacacgacgaccaacatttgaaggccatatagagatctgcccaccaggcatgagccattcagcttgttcagtaaacaagagtgttctagaagccatcagaggaagacttggatcttttcatgaactcctgctggagccacccaagaaaagtgtgatgaagaccacatggggtgtgctggatcctcctgtggggaatacccggttgaatgtcattaggttgatatccagcctgcttcaaaccaataccagcagtataaatggggaccttatggagctgaatagcattggagtcatattgaacatgtttcttcaagtatacatggaataactttttgcatacacaagtggaaatttgtattgcactgattcttgcaagtccttttgaaaacacagaaaatgcc

SEQ ID NO: 134 - DNA, 363 bp, Homo sapien
actgaaaacaaatgcttagaggggtgttacttaagccctctactgttaacctacattgtgcactttttttttttgaaacggagcctcgctctgtcgccaggctggagtgcagtggtgcgatcttggctcactgcaacttccgcctcccaagttcaagcgattctcctgcctcagcctctcgagtaactggggctacaggtgggcaccaccacgaccagctaatttttgtatttttagtaaagatggggtttcaccatgttggccaagatggtcctgatctcttgacctcgtgatccgcctgcctcggcctcccaaagtgctgggattacaggcatgcgccactgcgacaggccgttgtacctc

SEQ ID NO: 135 - DNA, 493 bp, Homo sapien
  misc_feature (1)...(493): n = A,T,C or G
acatccagcagctctgngaggacattatccaactgaagcccgatgtggtcatcactgaaaagggcatctcanatttagctcagcactaccttatgcgggccaatatcacagccatccgcagagtccggaagacagacaataatcgcattgctagagcctgtggggcccggatagtcagccgaccagaggaactgagagaagatgatgttggaacaggagcaggcctgttggaaatcaagaaaattggagatgaatactttactttcatcactgactgcaaagaccccaaggcctgcaccattctcctccggggggctagcaaagagattctctcggaagtagaacgcaacctccaggatgccatgcaagtgtgtcgcaatgttctcctggaccctcagctggtgccagggggtggggcctccgagatggctgtggcccatgccttgacagaaaaaatccaangccatgactggtgtggaacaatggccataca

SEQ ID NO: 136 - DNA, 516 bp, Homo sapien
caagaaccgcttgtagtttggtttaaattctgcacgggaggaccttctgagtttacctgttgggctcctggctgcgcaggcacagcagctacacagaagagatgggagaagaggctaatgatgacaagaagccaaccactaaatttgaactagagcgagaaacagaacttcgctttgaggtggaggcatctcagtcagttcagttggagttgttgactggcatggcagagatctttggcacagagctgacccgaaacaagaaattcacctttgatgctggtgccaaggtggctgttttcacttggcatggctgttctgtgcaactgagcggccgcactgaggtggcttatgtctccaaggacactcctatgttgctttacctcaacactcacacagccttggaacagatgcggaggcaagcggaaaaggaagaagagcgaggtccccgagtgatggtagtgggccccactgatgtgggcaagtctacagtgtgtcgccttctgctcaactacgcag

SEQ ID NO: 137 - DNA, 340 bp, Homo sapien
  misc_feature (1)...(340): n = A,T,C or G
gtcatggaggccatggggttggcttgaaaccagctttggggggttcgattccttccttttttgtctagattttatgtatacgggttcttcgaatgtgtggtagggtggggggcatccatatagtcactccaggtttatggagggttcttctactattaggacttttcgcttcnaagcgaaggcttctcaaatcatgaaaattattaatattactgctgttagagaaatgaatgagcctacagatgataggatgtttcatgtggtgtatgcatcggggtagtccgagtaacgtcggggcattccggataggccgagaaagtgttgtgggaagaaagttaga

SEQ ID NO: 138 - DNA, 320 bp, Homo sapien
acaattataggattgtaatctaaactggaatttttaggcagtaagtcaccacaaaatgttttagataagacacaataaaattattataaataaaagcttaatgtttgtaaaaaatctcttttttagtatttcttttttcacatgaaagaagtggtggctgctaaaaaaaaagctacagtgtttattaagggtcgttttgatttatgtaaatatttgtaaattggtcagtgcctgtaaatttaaatataaaaagtaaccttgaaaacagttttaactttttcaaaagaactatgtccaacattttttagacctgctgtagt

SEQ ID NO: 139 - DNA, 466 bp, Homo sapien
cccggagcacggagatctcgccggctttacgttcacctcggtgtctgcagcaccctccgcttcctctcctaggcgacgagacccagtggctagaagttcaccatgtctattctcaagatccatgccagggagatctttgactctcgcgggaatcccactgttgaggttgatctcttcacctcaaaaggtctcttcagagctgctgtgcccagtggtgcttcaactggtatctatgaggccctagagctccgggacaatgataagactcgctatatggggaagggtgtctcaaaggctgttgagcacatcaataaaactattgcgcctgccctggttagcaagaaactgaacgtcacagaacaagagaagattgacaaactgatgatcgagatggatggaacagaaaaataaatctaagtttggtgcgaacgccattctgggggtgtcccttgccgtctgcaaagct

SEQ ID NO: 140 - DNA, 489 bp, Homo sapien
acccaaaatcccacaataaaaaaatcatttaaagctgtgtgtttcaaacttatcacttagaaataaaaacaaaacaaaacataaaaacaaagatcagtttgcaacataatttaaagaagcttctggtttaaaataccacagcagcaatataaagagctggtggcaatcacattcgggagtgaaatcgaaatcaatatattttgtccacatcagcatccaattacagtagttgttaaattcaatccaaaaagttattgctgaatttgtggcatggaatttgagaagatagtattgttcagcagcacaaccacagcagtaaaaatgagaacaggaggatttcattgcttttgagagctaaagggaccgtgaggaggatatcttgctgattgcctgaagataatcctcagttacattcctgcatattacctgctttaaataaatgcaaatgacaaccaccttttcaggaggggcataataatgtaatccaga

SEQ ID NO: 141 - DNA, 351 bp, Homo sapien
gccaggtggtcagctttaaagctgtgaagatggtggaagctaatgtttctccagatactgctttctgacctagagccctgagtatttttcctatctcccttcctaaccttcttcactgaatttaagttgcagggccatttatggccatctatacactttctctttgcagcagggaatgtcactgtatcccccgtggtagcagtaatttgggcttttattagcaaagaagattatagggtggatgctgctggagtggtaattgcacttcagaccctgttgaaattcagtaactggaagaatctctttttgagctcagagtcctcttggtgtggaaggttcataggtcattgt

SEQ ID NO: 142 - DNA, 406 bp, Homo sapien
  misc_feature (1)...(406): n = A,T,C or G
ggaaaacccggtaatgatgtcggggttgagggataggaggagaatgggggataggtgtatgaacatgagggtgttttctcgtgtgaatgagggttttatgttgttaatgtggtgggtgagtgagccccattgtgttgtggtaaatatgtagagggagtatagggctgtgactagtatgttgagtcctgtaagtaggagagtgatatttgatcaggagaatgtggttactagcacagagagttctcccagtaggttaatagtggggggtaaggcgaggttagcgaggcttgctagaantcatcaaaaagctattagtgggagtagagtttgaagtccttgagagaggattatnatgcgactgtgagtgcgttcgtagtttgaagtttgctaggcanaatagtaatga

SEQ ID NO: 143 - DNA, 286 bp, Homo sapien
actaaagaggaagcaattgagcacaattatgggggtcacgatgacgacctgtctgttcgacactgcactaatgcttacatgttagtctacatcagggaatcaaaactgagtgaagttttacaggcggtcaccgaccatgatattcctcagcagttggtggagcgattacaagaagagaaaaggatcgaggctcagaagcggaaggagcggcaggaagcccatctctatatgcaagtgcagatagtcgcagaggaccagttttgtggccaccaagggaatgacatgt

SEQ ID NO: 144 - DNA, 400 bp, Homo sapien
actaaaaatcaattggatgaactaaatccaaaacatgacactgtaggcagcagttttaagtcttatttttactgtttatatatttgaatgctgctacaacagatgatcttcatccctgaagttttcagctaaacttggtttcctagaatagactgttaactttcaaaatttttattggtgaaatggaaatactgtttttccttgtgaatgaattttcatatttgtaagtgctaagtttataattcaggtttgatcaaggtgtgaataactgaagaaaataacttgctggctatataggaaaatgctgtggaaatgaactgtgtatatacttctgggaggaacaaatttaatcatttcttctgttaagcactaatcagtatagtgcaactcctggttctgt

SEQ ID NO: 145 - DNA, 485 bp, Homo sapien
  misc_feature (1)...(485): n = A,T,C or G
accaacataatacacctttcatattatgtattatcttgcttaatgggttttatcttgattatccagttacttccatcctcttcccaatgttaatttgcaatagttttaaaatgggaacaaatgaatcaatcatcagatanntaaaatgaaattaaatcagctgcctaataatttatggaattcattggaatgtgcttaaaatgctaaagtgtatgtcattgaacatgaaatcttttttcaggcacatacattgttggtattgatgactttttaaaacctgtgggataaacttgcactgcacacggaagttttattcttgtatatttagatttgtatgcttgtgagtaaaaatgtgcatttgtaaatactgtgttttttaggttgaatcaattaagtcttaaaactgtaaatttattaagcttgttgccagtaggtttaaagaaaatcatgatctcacatgcctcactttgacatttatcatgcct

SEQ ID NO: 146 - DNA, 195 bp, Homo sapien; identical to SEQ ID NO: 8

SEQ ID NO: 147 - DNA, 483 bp, Homo sapien
  misc_feature (1)...(483): n = A,T,C or G
actaacaatgtattaatagaaaggatgacatctaggtgtatagcaattaaatgacttaaatgagttaataaatgtaaaacacagaaaactatctggccccctccatactgttagttgctgttgttgttattcttttaagtgaaaatttttaaaagcatcttttgctgctagactatctgggttcaaatactggtcctgtcactccctaatggtgtgatcttgggccagttatcaaaccttaccaagttctaatctgtagaatgtggataatagccttagtctcagagagttgttgtggggattaaatgagataaagacacaattaaatcagataatggagatcataggagatgcttgaacccagtaggtgctaacctattatttgccttcctacaagtctgcanggagcgatcaactgagtgaaaagcctagaaatcattccacaggaaggacatgaaaaaaatggagcatgaagctgttttt

SEQ ID NO: 148 - DNA, 348 bp, Homo sapien
acctaaaatggatttgactatattcaagccactttcatatattaactagataaaaggataccatactgctatttgaaattcaatcacaaagcaaaaatgtcataattttaatgtattttaagggaagacggggttcttaacatgaatatgtaatacaaaaacaattctaaataataatatttaatagaagaaaaaatctgtataattatttagaagtaactctgtttttaaaatttcaatgttaggaagaaaatcccttaaatttgaaatagcggaatattctctcatatgaaaaaactgtgtcccagtgttattcttcaacttagaaattaggcaaagtattttagt

SEQ ID NO: 149 - DNA, 289 bp, Homo sapien
acttgttcctactattatttttgtatatgaagaactggctttggatttaactgaaaacttaggaaaacaatctaatcgctgttgtctatatcattgatttaattcatcaaagttactcaaatgattgatatttttacttgctaattattttaggagtgattttgtgaaatttatttttaatacagtcctagaattgaattgaaatatggtttggaagtttgagggttttttactgtgtctatccttgtgtgtctgtttcctttaaagattcatgatacaatcactgtgt

SEQ ID NO: 150 - DNA, 243 bp, Homo sapien
acaatggaatatcattcagccttacaaaaggagatgctgctatatttgcaataacatgggtgaacctggaggacgttacgctaagtaaaataacaatattgaaggaaagaaataatactgaaagaaaaatattgcttgatctcacttatatatggaacttaaaaactacacatagaaacagggtagaatggtagttatccaggctgggaggaagagaaaacagggaggtgtaggtcaaagggt

SEQ ID NO: 151 - DNA, 185 bp, Homo sapien
  misc_feature (1)...(185): n = A,T,C or G
ttttttttnntnttgaaaaagtcatggaggccatggggttggcttgaaaccagctttggggggttcgattccttccttttttgtctanattttatgtatacgggttcttcgaatgtgtggtagggtggggggcatccatatagtcactccaggtttatggagggttcttctactattangacttt

SEQ ID NO: 152 - DNA, 493 bp, Homo sapien
  misc_feature (1)...(493): n = A,T,C or G
accagtgtggnnaaatgggctggttaactgtgtgggcccagacagtcatttgtctatattcctagtgatgagaaattattccccctaaccttccaatgaaacaagtgtccacatagttctcatttttccctattgttgaaacattagtgagagggacccatgcatgttattaaaaattaagttcaaaacacttaaaataattctgtattagaaacttgactctatcataagtctcttcttttggaagtcatactgggctggttaaatgctccaattccattgttattaacatttaggaagcagaagactattccagctagttcaaactagaggtttagttactacaacactgattcctggttggttgtgtgggttcggtaaggtntactcctcttcctctggcagaatttgctcctggatttttgtggttcattctttggcaattttttagctattgccatgaanatttcatttacattcattgatgttttag

SEQ ID NO: 153 - DNA, 163 bp, Homo sapien
  misc_feature (1)...(163): n = A,T,C or G
acagtggcctgttatctttttaatgaatatatacaagccaacatccaatttctattattacaattagggttcttgtagctgtttatgttaatatggagaanaaaactatattggctgattttttctgatcttaaancagaataccttttctttttttgcttca

SEQ ID NO: 154 - DNA, 362 bp, Homo sapien
  misc_feature (1)...(362): n = A,T,C or G
acagaactcacacgaaaaaagaaattaaattttagctttctggagagcagcccctctctggcaccatcaaacacttctttgtttcccttcaacttggaactcttcaaacatcaggggttgtgagggtttggccattcttttatcttgggtccatgtgagtgacagaaatggtgcggcctgggaaagatcttgnngagagatccctggcccaggacaggagatgccaaatctaatttatctcactgagggcctttgagaaaaacgcttcctgggccaggctcagtggctcatgcctatataatcccagnacctgcccgggcggncgccgggcaggtnntaatttgattcctccatccttgaat

SEQ ID NO: 155 - DNA, 213 bp, Homo sapien
acacatctattttttatactttttttttaaaaaaagaatgtcagttgttatttattcaaattatctcacattatgtgttcaacatttttatgctgaagtttcccttagacattttatgtcttgcttgtagggcataatgccttgtttaatgtccattctgcagcgtttctctttcccttggaaaagagaatttatcattactgttacatttgt

SEQ ID NO: 156 - DNA, 165 bp, Homo sapien
acaatgatagtgccgggttggcagttaactctttcaccctactaaattcaagagctcatctccaccctgtcctgtatattttctacatttctattaagaggctacttggtagtgtcagcgggcatcttttacaccttctagtagctcaagccagtaaaaccttgt

SEQ ID NO: 157 - DNA, 406 bp, Homo sapien
  misc_feature (1)...(406): n = A,T,C or G
accacatacctnngtttcagaaaccacccattctacattaaaatctaanncctttatcatctatggctctttgnnattatagaanntctacataggtatttatttgcctttcttcctatcaatcagatttatttattttaaaagcccttgataagtagtaaaatatttaactgcttttcttaaccatacaagtcanaattagattntaaaattctatgaaaaatttttggataacaaatctaactagagacttaatgatttgtgttaggattctgtgagccatacttcagcttattattngtntctcagcaatccccagatttgattgtcttgttctaccagagtaagcttaaccagtttttattatctaaaatgcttaataagtgccccctccccgccaagtgat

SEQ ID NO: 158 - DNA, 341 bp, Homo sapien
acagggtttactctcagaaacctacctggaagcccatcggattgtgaagatgaacaagagtgaggatgatgagtctggggctggagagctcaccagggaggagctgaggcaaattgcagaggaggatttctacgaaaagctggcagcttcaatcgccccagaaatatacgggcatgaagatgtgaagaaggcactgctgctcctgctagtcgggggtgtggaccagtctcctcgaggcatgaaaatccggggcaacatcaacatctgtctgatgggggatcctggtgtggccaagtctcagctcctgtcatacattgatcgactggcgcctcgcagccagt

SEQ ID NO: 159 - DNA, 540 bp, Homo sapien
  misc_feature (1)...(540): n = A,T,C or G
acgtagtctaggccatatgtgttggagattgagactagtagggctaggcccaccgctgcttcgcaggcggcaaagactagtatggcaataggcacaatattggctaagagggagtgggtgttgagggttatgagagtagctataatgaacagcgatagtattattccttctaggcatagtggggaggatatgaggtgtgagcgatatactagtattcctagaagtgagatggtaaatgctagtataatatttatgactactaaattaataaatttattccacttttgaaatgacagccaaaaatccacctaattgattctcatttggcacgttcttctcaattctgttcactaaattaaaattactaaatttaaactgccaagagccatgatgttgtctgcacaagacaacattttccatcactttcagaaagttatatttggcatgttaaggaaaaaaaatataatcccacagcagcagctatttaaaataagacagccaacaggattcatgcanaaatatttttaaatattcctgttg

SEQ ID NO: 160 - DNA, 235 bp, Homo sapien
acttaagcatttccacttttggaagaaaagtgtattagtattttatattgcatttcatttaaaaggacagtttttttttttgtaaatccattcattgaaatggtttctaaactgtataatgtaatttggagcctatttagtaatagaattaaatgtcctatgtagtgctacaatttttgaattagaaagtgatcaaaagtaaaaaaaaaaaaaaaaaaaaaaaaaaaaaagcttg

SEQ ID NO: 161 - DNA, 259 bp, Homo sapien
acgtgaaagtgctcatccaggtgggatatgagcctcttcctccaacaataggacgaaatatttttgggcggcaagtgtgtcagcttcctggtctctttagttatgctcagcacattgccagtatcgatgggaggcgcgggttgttcacaggcttaactccaagactgtgttcgggagtccttggaactgtggtccatggtaaagttttacagtattaccaggagagtgacaagggtgaggagttaggacctggaaatgt

SEQ ID NO: 162 - DNA, 313 bp, Homo sapien
actctataaatctagtggaaacatttctgcacaaactagattctggacaccagtgtgcggaaatgcttctgctacatttttagggtttgtctacattttttgggctctggataaggaattaaaggagtgcagcaataactgcactgtctaaaagtttgtgcttattttcttgtaaatttgaatattgcatattgaaatttttgtttatgatctatgaatgtttttcttaaaatttacaaagctttgtaaattagattttctttaataaaatgccatttgtgcaagatttctcaaaaaaaaaaaaaaaaaaaaa

SEQ ID NO: 163 - DNA, 532 bp, Homo sapien
  misc_feature (1)...(532): n = A,T,C or G
acataatcgttttgtggagtcggcacagttcaggttatggaggcacgtaattcaccaaagtgcaaaaaaggcaaaggaaaacacactgcattgtagaataaggcattcaaatgtgctgttaacgtttaaggcagctaatggccaaaacaggcaagtcaagaaaagtggtctggtttggaggtgattttgcatctagaaggcattctcttctcgtgacctcaaagactgagcactgtagagcatgtcttcttcctcaaggccaatgatacttcagataccagatggtttcatttttcaattgcggtccaaagagagggttgagttgggccagaattgcaatcagccaaaagagatagcagcaaactgaacaggtcaccaacatggtaatgataactccccggttaggacccttagggatgaaccaaggtaccaagaagccgacgaagccccagaacacgctcatcacaatgagaggcacagtgaggccgtgatacgccatggtcgccgcctgagcgccaanccctaccccgtc

SEQ ID NO: 164 - DNA, 554 bp, Homo sapien
  misc_feature (1)...(554): n = A,T,C or G
acaggtgactgaaatgagccctgcggggagcccagctgcccaggccaccgtcccagtcaccatcaggattgtggacctcaacaaccacccgccaacattctatggagagagcggaccccaaaacaggtttgagctgtccatgaatgagcacccaccccagggagagatcctgcggggcctcaagatcaccgtcaatgactccgaccagggagccaatgccaaattcaacttgcagctggtggaacccaggggcatcttccgagtggtcccacagacagtcctgaatgaagcccaagtcacaatcattgtggagaactcagctgccattgactttgaaaagtccaaagtattaaccttcaagctcctggctgttgaagtgaacaccccagagaagttcagttccacagcggatgttgtgatccagctcctggacaccaatgacaatgtccccaagttcgactccctctactacgttgccaggattnctgagaacgccccanggggctccagcgtggngggctgtcacagctgtggatccagatacaggaccctgg

SEQ ID NO: 165 - DNA, 170 bp, Homo sapien
acatgtctagcgcctggcagaggggggcagcagggcagcagcgggctggagccagccctatttgtagaggatatcgtagtgtccaggccggtagagaaggtagaccttgggctcggagccctcagggaagatgtgcggattggtggtgccgccctcgccgcggtccatgt

SEQ ID NO: 166 - DNA, 95 bp, Homo sapien
actgtgagctttcataaggttaatgattgaggatgccagtgaagggtgcagggacaaaacctaatagtcttggatggtggggggaggatggccac

SEQ ID NO: 167 - DNA, 462 bp, Homo sapien
  misc_feature (1)...(462): n = A,T,C or G
tcgagcggccggccggcaggtactccagatctctttcggcttcctatgagaaacaccagaagcattactttccacttctacttacagtaattgcaagaggagacctcacattcaggactggcctagtgaacgtaatccatgctttaaactggccattaaacagtcccacatggttggattttttttttttttttttgagttgtgctttcacaaaaccttgtcaaagacctcatgcaatatcactttgaaagttattttctgtttactacacaaacattgtaatataactgttaatactatttatatatttgaaaggtataaaaggtaggagttaaaaaaaaaacctctatgtgtagatattaactcagaacttacaatntacagggagaagacatgttgcaatacaagctaattctagctgctcagtaacctctggagttttttaaagggacattttcctgt

SEQ ID NO: 168 - DNA, 516 bp, Homo sapien
  misc_feature (1)...(516): n = A,T,C or G
actcgggaagctggnncgggccggcggtgcagtcacgggggagcgaggcctgctgggcttggcaacgagggactcggcctcggaggcgacccagaccacacagacactgggtcaaggagtaagcagaggataaacaactggaaggagagcaagcacaaagtcatcatggcttcagcgtctgctcgtggaaaccaagataaagatgcccattttccaccaccaagcaagcagagcctgttgttttgtccaaaatcaaaactgcacatccacagagcagagatctcaaagattatgcgagaatgtcaggaagaaagtttctggaagggagctctgcctttttctcttgtaagcatgcttgtcacccagggactagtctaccaaggttatttggcagctaattctagatttggatcattgcccaaagttgcacttgctggtctcttgggatttggccttggaaaggtatcatacataggagnatgccangagtaaattccatttttttgaagatcagct

SEQ ID NO: 169 - DNA, 509 bp, Homo sapien
actaatgtgatcacagaaaaatagcaaactgaagtcaaaaagcacaggctgcccatcatagagtccccagtctatttaatattttcgacctgctctgaggatggagggtgtcaacaccttagaataccatgatgggctttaaaactgggtaaagaatcatccctagggttagggcaaatgtaacttcacttattgcttacacacagggaaaaaatctgtttccttttccaagatattcttttaaggattacttgacagtggttcttttaaaggtatcaaaagatgtcctaaaaaaaaaaaaaccctctttggaattctctcggaattccagaaagattatctggcaattcattcctccaccccatcaaaatttttcctttgaaaaattacaactggcaactcacataagatttaatcaacttacttaaaataagggagggcttctcaataatgttttccccactagaaaactaagaaattcagtgatactcagtgccagtaattaagtg

SEQ ID NO: 170 - DNA, 230 bp, Homo sapien
acagtgtgatgatactaaaccagctagggtagaagcacttgctttctctcagcaaggcatgtgctgcatagcctctttgaaagacagaagaataaattacaaagataaattaagcaggatctttgatttgaactcataacctggtaggggagccagatacattaatgaatggtaaaatatcatagtagaggtttgtagaaaagacatggcagctccagcaagagagcagt

SEQ ID NO: 171 - DNA, 571 bp, Homo sapien
  misc_feature (1)...(571): n = A,T,C or G
acttcagttggtgcacaaaatactgtcatttgctcaaagcgtgagtaaaatatcctaattacctgtaagctttattttgacttaatacttctttaattgatgtgccttgagttggaaagagttttattggcttaaatctgaatcatgttacaaagtaagtgtgggaacacataaatttcaaataatctttgaccccggaactttagagttaatttttttttcccgtaatcatgaaatcagttatttttcagtttggcattaaggtttctttttcagtgactgccaaatgtttggtgatgaaggcagaaatgaatggctcaaaacttgggagaagagcaaaacctgaaggggccctccagaacaatgatgggctttatgatcctgactgcgatgagagcgggctctttaaggccaagcagtgcaacggcacctccacgtgctggtgtgtgaacactgctggggtcagaagaacagacaaggacactgaaataacctgctctgngcgagtgngancctactggatcatcattgantaaaacacaaagcangagaaaaccctatgataataaaa

SEQ ID NO: 172 - DNA, 335 bp, Homo sapien
acacgacataaggccttttataaatagctttgcttttctcatttcactagtaaacagtgaaaaaatctttatagaagctagttttctataaagtgaaggcagacctagtatattgatctttaaatgaaaccaatttaaactttcaatgacatgaactataattttgcaaaagaatttatacttaatttaccatgtgtgtggatggatttttaaaaatatataagcagattacatatgttgcttatgtataatcactggatgcatgcacaatgaaataatgcaaaagtccataggaaaatagcacttccaactccaaaaaggtgattggcaatggt

SEQ ID NO: 173 - DNA, 233 bp, Homo sapien
acactcttttctctccctgttttgcagcaacaaattgcgaagtgcttttgtttgtttgttttcgtttggttaaagcttattgccatgctggtgcggctatggagactgtctggaaggcttggaatggtttattgcttatggtaaaatttgcctgatttcttacaggcagcgtttggaaaccttttattatatagttgtttacatacttataagtctatcatttaaagacatgt

SEQ ID NO: 174 - DNA, 490 bp, Homo sapien
acacttttgctgagagctacaaaaagaagataagccccaaggaagaaattagcctgagcactgtggagttaagtggcacggtggtgaaacaaggctacctggccaagcagggacacaagaggaaaaactggaaggtgcgtcgctttgttctaaggaaggatccagctttcctgcattactatgacccttccaaagaagagaacaggccagtgggtgggttttctcttcgtggttcactcgtgtctgctctggaagataatggcgttcccactggggttaaagggaatgtccagggaaacctcttcaaagtgattactaaggatgacacacactattacattcaggccagcagcaaggccgagcgagccgagtggattgaagctatcaaaaagctaacatgacaaggacctgagggaaccaggattcctccctcctaccagatgacacagacaagagttcctggagaatgggagtgttaagacttttgact

SEQ ID NO: 175 - DNA, 498 bp, Homo sapien
acagttaacattgtgcaattggaatgaccaagatactagtaaatcctttggtgatcacataagtgtaatcttccccactttataccagaagactaaagctacagtttaaaagttcatttgaagttttgttttgctcagtggcaaagatcaaatgggaccatccctctccctgttgaccactctaattgagtcctgagtggaaaaagcttaaatataaagggtttggcaacttttagaagaaggagactcttgaaagaaggttaccaggaaaattgaggattaaaaagatttagaaataatagctatcaaattcgaatttgagaatattaattttgacttaaaagcataatacacgagtccccaatgcaaatatgcttaatccctcactctatacatacttatttacacttcttgttcctttttaagaagtgaatgtagttaagaaaaatgttaaatgtaaacctacttttctgattcccccacccctcaaccaggact

SEQ ID NO: 176 - DNA, 441 bp, Homo sapien
catgattttgcttaaattaatacttttaagtaatggaacttttttcaaaggcaaatttaaactatttaagaaatagctcctaatacttgggatcttgtttagagaatccactttctggaagttctcagcataattagtgttgagagtggttcagttgtctttaatgtttgtcatgtggaaatggaagtagcctctttttgttctgaaattgagtttattcaaagtgtaaaagcacatactgcattttctgctgaaagatcattatgtttaacaggcacttaatctcagtaaagtcagttgccagttaagttccacccagtagtcagtcccctttgtagttagtgggattatttgataattggttagatcatacttgtaaattttaatgctttgtgtaattggtttgaaaaacagtgaaatgggtaaacgcaaaacttttgt

SEQ ID NO: 177 - DNA, 195 bp, Homo sapien; identical to SEQ ID NO: 8

SEQ ID NO: 178 - DNA, 367 bp, Homo sapien
acagaatatttaatgagtctgtcttgccccaaaagggaaaaacacaagtagctaagccatttgcagagaggaaaaatgtcatggaaaaatgaaaaatctctctaatgtctatagcacatgaaatatctaaataggtgggtgcagtggttcatgcctgtattgggagaccaaggcaggcagatcacttgacgtcaggagttcaagaccagcctggccaaatggcgaaaccccgtctctattaaaaatacaaaaattagctgggcatggtggtgggtgcctgtaaacccagctacttaggaagctgaggcaggagaatcatgtgaacccaggaggcggaggttgcagtgagctgggatcacaccactgt

SEQ ID NO: 179 - DNA, 390 bp, Homo sapien
acagttaaattaagaatattaaatcttccacacatgggctcaaataggaagtattttgtttagtaaaatgaaaattacttttaaaaaatatctgcagtgtttttgaaatgcaaggcaccaatagagagcagacattccagctgagtgattgtctggaaaaaaaaaatggaaccggtcagtcctctgtccttgttaattagaatacttccttcttcgtgtctatgcaacatcttccagataatccgcaacatcactgagctgggatacagtcagatcttgtgtgaggtcatcaagcttatcactggtattgatgtcatctatttccacagaaaggtcttcttctatctcttcaccaatacttatctcacttttctctgagcgatggctggt

SEQ ID NO: 180 - DNA, 195 bp, Homo sapien
accattggtggccaatagatttgatggtaagggagggatcattgacctcgtctgttatgtaaaggatgcgtagggatgggagggcgatgaggactaggatgatggcgggcaggatagttcagacggtttctatttcctgagcgtctgagatgttagtattagttagttttgttgtgagtgttaggaaaagggcgt

SEQ ID NO: 181 - DNA, 554 bp, Homo sapien
acctggacaacagagaccaagaaggcttctactgtgtgaggcctcaacacatgccctgtgctgcactcactcacatgtattctaagaacaagaaagtttcttatcttagcaaacaagaaaagagcctctttgaaaggtcaaatgtgggtgtagagattatggaaaaattcaatacaattagtgtctccaaatgcaacaaagaaacagttgcaatgaaagagaaatgcaagtttggaatgacatccacaatccccagtgggcatgtctggagaaacacatggaatcctgtctcctgtagtttggctacagtcaaaatgaaggaatgcctgagaggaaaactcatatacctaatgggagattccacgatccgccagtggatggaatacttcaaagccagtatcaacacactgaagtcagtggatctgcatgaatctggaaaattgcaacaccagcttgctgtggatttggataggaacatcaacatccagtggcaaaaacattgttatcccttgataggatcaatgacctattcagtcaaagagatggagtacctg

SEQ ID NO: 182 - DNA, 195 bp, Homo sapien; identical to SEQ ID NO: 8

SEQ ID NO: 183 - DNA, 498 bp, Homo sapien
accttacaccaataacccctaacagcctggggtctcagtggaactaacttaagtgaaagaaaattaagacaggcatagaattaggcctttgttttgaggctttaggggagcagagctccattgtggcatctggagtttcatctgaggcctacaggggtttcaaatggttgcatttaaggtcagaatctttgtgttgggaaatgctagcgactgagccttgacagctgagcacgggttgcctcatccctctcatgctgtctatttcttaatctaacaactgggcaatgcgttaaactggcttttttgacttcccagaacaatatctaattagcaaataacacaattcagtgacattcagcaggatgcaaattccagacactgcaatcatgaacactgtgaagacagtcctctccgtgggccgggacacaaagcagtccacagtgttgggacaaggccaggcgttgcacttcaccagccgctgcatggagaagccgtcgt

SEQ ID NO: 184 - DNA, 110 bp, Homo sapien
acgggtatttgaaagtaacaaattatactacttacatacagagaaaaagacataactaaactacttcaaacccaatgcagaggaaactttcaaggcaaatgatgacttag

SEQ ID NO: 185 - DNA, 557 bp, Homo sapien
  misc_feature (1)...(557): n = A,T,C or G
acaaagattggtagcttttatatttttttaaaaatgctatactaagagaaaaaacaaaagaccacaacaatattccaaattataggttgagagaatgtgactatgaagaaagtattctaaccaactaaaaaaaatattgaaaccacttttgattgaagcaaaatgaataatgctagatttaaaaacagtgtgaaatcacactttggtctgtaaacatatttagctttgcttttcattcagatgtatacataaacttatttaaaatgtcatttaagtgaaccattccaaggcataataaaaaaaagaggtagcaaatgaaaattaaagcatttattttggtagttcttcaataatgatgcgagaaactgaattccatccagtagaagcatctccttttgggtaatctgaacaagtgccaacccagatagcaacatccactaatccagcaccaattccttcacaaagtccttccacagaagaagtgcgatgaatattaattgttgaattcatttcagggcttncttggtccaaataaaattatagcttcaatgggaaga

SEQ ID NO: 186 - DNA, 493 bp, Homo sapien
  misc_feature (1)...(493): n = A,T,C or G
actcctctctacccctaaggttgggctctgcctcagaggagtgagttttttttttttttctataaagtttacattgtcttactatttattgagtgaatttctggtcattgcccatgcaaatataagaaatctggctttaaatattagtcagtttcatggctatgactagattgttttcttgtataactaaatacccgtataaaatgaactaatgttttctctcccctccctaccccttccttatgaacaatgctttaggtatattgaaatctttaagagcagtagagctgaagttagaactcattatgatccaccacgaaagcttatggccatgcagcggccaggtccttatgacagacctggggctggtagagggtataacagcattggcagaggagctggctttganaggatgaggcgtggtgcttatggtggaggctatggaggctatgatgattacaatggctataatgatggctatggatttgggtca

SEQ ID NO: 187 - DNA, 488 bp, Homo sapien
  misc_feature (1)...(488): n = A,T,C or G
accttgaatttaaattttttttaaacttcagtcttcaatattgaaactgctaagttaccccatttttccatgaaaaaaaatagaaaaataaacttggggaaaaaattaaaaataaaaaataaacttgggaaaacattactaaataggtttaagaaaaaagcctatataggccaggtgcggtggctcacacctgtaatcccagcactttgggaggccgagccagacggaccacctgcccgggcggccgcccgggcaggtactttggtagctatttaaataagaggggggtgggaatgaatgtcgagatacgagcacctgcatcttttagtcaattgtcagtggagtcagtggggtgctaagtgttctgaactganntaggtgcactaaggttccaagctccctgcaaaggatctggacgggangaaaagcnnaggcccctgaagggaaaaaagcctgcttcccaatacttattttttattactgtacct

SEQ ID NO: 188 - DNA, 498 bp, Homo sapien
actccttatgctagcagattcaaagatatgcctaactttattgcccttgagaagtcatcagttctccgccactgctgtgaccttttgataggcattgcggctggatcaagtgataagatttgcaccagcagtctccaagttcagagacgattcaaggcaatgatggcatctattggaagactttcacatggtgagagtgctgatctgctaatcagctgcaatgcagaatcagccataggttggatcagctcaagaccatgggttggagaattaatgttcacacttctatttggagactttgaatcccctctacacaagctacgcaagtcaagttagttgccaagaaagcacagatgacaacctattaatgctgtgagaatgtttctagatcagtgcatggatggctccattgctctacgggccattgtgtctgagatcccagtctttgaggagaaaaaaaacaatggttaaaaaggcattggggaaatattttgagtt

SEQ ID NO: 189 - DNA, 501 bp, Homo sapien
  misc_feature (1)...(501): n = A,T,C or G
acagcaaccttggttcctctgggggttgagaataagaatagtggggagggaaaaactcctccttgaagatttcctgtctcanagtcccagagaggtagaaaggaggaatttctgctggactttatctgggcagaggaaggatggaatgaaggtagaaaaggcagaattacagctgancggggacaacaaagagttcttctctgggaaaagttttgtcttagagcaaggatggaaaatggggacaacaaaggaaaagcaaantgtgacccttgggtttggacagcccanaggcccanctccccagtataagccatacaggccagggacccacaggagagtggattanagcacaagtctggcctcactgagtggacaagagctnatgggcctcatcagggtgacattcaccccagggcagnctgaccactcttggcccctcaggcattatcccatttgggaatgtgaatgtggttggcaaagngggcagnggaccccacctgg

SEQ ID NO: 190 - DNA, 513 bp, Homo sapien
acataagaaaatatttacaactaataaaaagcagattgtagaatatacatgttctatgtaggaaaataagtaaaatgttttatagtgcagaccaaacttttctaggccaagttttatccatgcaactcttttacaataccatctcattaacattcctggaacacatacatgcatggaagaaatctaacaattatcttgatttaaagctcatactgcctttttagggcctgtatatcttctaaagtaaaatggttgtttggtgtgtccgaaaggtcctcaaacagctgttcaattagctccttttggcccttgctaattagtgtcaacatcatcttaaacctttctgctttactcaggtataaaagatgctgatacaccaatgagggatctttttcaataagattatttttcagagactgaatgaggagaaggaatgtatccccttcaagtttgttacttaaaaacatcggcaaatcttttggtgcagtgatggctaaaagatgtgcacaggct

SEQ ID NO: 191 - DNA, 312 bp, Homo sapien
actagaaacggaagtggaaacacatgcacagtttatcttttcactcttgtgaggtcagcagacatctgtaacgcactttccctacagcagctaacaaaggcaggatgatggtatctgttctgaacgtttgaaacaacatcaccacttatctttacagatttcctcaggttctcaatggagggcctgaaaaacatcactgtcaaggatgatgctgctacattttatgagctggagacgaacgagccctctcctgatgcctctccagtcacaggaataatggttttgaaaacgtcaatgctccatctgccttgt

SEQ ID NO: 192 - DNA, 386 bp, Homo sapien
acttaatcaataaagtgaatgctttgtgcagttttaacaaagctgctgctaaaaagacagttgtgagtggtcaggtatatctgcaatagtaagcaagttcttacctttccagttctgtatgcttctgaaaacaccagctaaggtattaaatacccattttcaagtgaccttgtttttactatttcatatttatgacatctagtgctgagattctgggggctttaatagataaccttattaacccagataattttttttggagcccataaaataaaattgagaatggcatttcgggaaggtctacatatatgtatttagtaagttaattcgtaagttcactttacatagtaaattaatatttaccagtttttaattgctttcagtgt

SEQ ID NO: 193 - DNA, 454 bp, Homo sapien
gcagatgcaggtggaggcagagcggcggaaacgggccacagttctagagtctgaggggacccgagagtcggccatcaatgtggcagaagggaagaaacaggcccagatcctggcctccgaagcagaaaaggctgaacagataaatcaggcagcaggagaggccagtgcagttctggcgaaggccaaggctaaagctgaagctattcgaatcctggctgcagctctgacacaacataatggagatgcagcagcttcactgactgtggccgagcagtatgtcagcgcgttctccaaactggccaaggactccaacactatcctactgccctccaaccctggcgatgtcaccagcatggtggctcaggccatgggtgtatatggagccctcaccaaagccccagtgccagggactccagactcactctccagtgggagcagcagagatgtccagggt

SEQ ID NO: 194 - DNA, 195 bp, Homo sapien; identical to SEQ ID NO: 8

SEQ ID NO: 195 - DNA, 290 bp, Homo sapien
  misc_feature (1)...(290): n = A,T,C or G
ccaggccagctggtctttaattatgtggttccgaagcaaattccttgtatgggcatcaattggaggggttccatctttgaatacagaattcaggggagccaggagggtcaaccgctcacttccagagagatgattgccgaggccggcttgtctgaaaaggtcaatggctgtggacacatcannctctgcagccaattcaaatagtgtcttggctgagtctgggatgagtagctcatcaatgtannggatcacccnnttggtggctangatgtctttattggagatgatcg

SEQ ID NO: 196 - DNA, 492 bp, Homo sapien
tcgaaacttacctgcgggactgccctgacccttgtataggttggtgagcacacgtctggcctacagaatgcggcctctgagacatgaagacaccatctccatgtgaccgaacactgcagctgtctgaccttccaaagactaagactcgcggcaggttctctttgagtcaatagcttgtcttcgtccatctgttgacaaatgacagatctttttttttccccctatcagttgatttttcttatttacagataacttctttaggggaagtaaaacagtcatctagaattcactgagttttgtttcactttgacatttggggatctggtgggcagtcgaaccatggtgaactccacctccgtggaataaatggagattcagcgtgggtgttgaatccagcacgtctgtgtgagtaacgggacagtaaacactccacattcttcagtttttcacttctacctacatatttgtatgtttttctgtataacagccttt

SEQ ID NO: 197 - DNA, 470 bp, Homo sapien
acctgtgggtttattacctatgggtttatatcctcaaatacgacattctagtcaaagtcttggtaatataaccaatgttttcaaatgtattctgttatacaaagagcagatttttattgaacttgtgcaataactatattaccatacaatataaatattcatgaatagtttcccaagtctggagcgaccacatagggagaaaatgtaaatgtctcaatttttgttcacaaaagtatattttatcaaattgctgtaagctgtggatagcttaaaagaaaaaaagtttcctgaaatctgggaaacaagacatttaaagaatcagcaaaatttcaaataaaaaattatgaaaatattatcctcattagttcatttagtcccatgaaattaattattttctctgcttgatcttggtggacagtttcatgaagctgtcagttagttcattaaagtttttggaaattctcagacag

SEQ ID NO: 198 - DNA, 448 bp, Homo sapien
  misc_feature (1)...(448): n = A,T,C or G
attaggggaattttttaaaatctgtaatgtttggacaaacagatgatattactttgctataaaattataaatgtaacttttaataaagatagccagaatattctaaattagaaattacgtttttgtttccctcaagacataaaacaaatataaacattctaaactgctggatgaatctgaaaagacattaagttcaaattttaatttattctcatattaaatataactccattaaaagtttaaaatttcatgggagaaaatataataaggtaaagaggtagaatcactttcagacttaagaataatgttgatttcccaagtgctttaccttatctgttaaagcgtaagatgaattggtatttgcttcataggcagtttgactgcatgtattanagaatgaaaagaagatatttgtagtaatgcctggaaacttggtgctttaaattaa

SEQ ID NO: 199 - DNA, 270 bp, Homo sapien
acctttggagataatgataaaattcaacaggttgaaccgtctaacaacagactttaatgtaattgtggaagcattgagcaaatccaaggcagaactcatggaaatcagtgaagataaaactaaaatcagaaggtctccaagcaaacccctacctgaagtgactgatgagtataaaaatgatgtaaaaaacagatctgtttatattaaaggcttcccaactgatgcaactcttgatgacataaaagaatggttagaagataaaggtcaggt

SEQ ID NO: 200 - DNA, 473 bp, Homo sapien
acagacaaggtctatagaatgtggtaaaaacttgactgcaacacaaggcttataaaatagtaagatagtaaaatagcttatgaagaaactacagagatttaaaattgtgcatgactcatttcagcagcaaaataagaactcctaactgaacagaaatttttctacctagcaatgttattcttgtaaaatagttacctattaaaactgtgaagagtaaagaaaactaaagccaatttattatagtcacacaagtgattatactaaaaattattataaaggttataattttataatgtatttacctgtcctgatatatagctataacccaatatatgaaaatctcaaaaattaagacatcatcatacagaaggcaggattccttaaactgagatccctgatccatctttaatatttcaatttgcacacataaaacaattatataaacaactttgtaggactatgcccttttgtgt

SEQ ID NO: 201 - DNA, 463 bp, Homo sapien
gttttaccactctgcagagaaagctaaggttgctaaccaaacaaaataactttacactgacaatgccaatttttacatttctttcagaacaagggacactcaaactaccagagaaacggaccaatggactgcgaagaactcctaaacaggtggatccaggtttaccaaagatgcaggtcattaggaactattctggaacaccacccccagctctgcatgaaggaccccctttacagctccaggccggggataccgttgaacttctgaaaggagatgcacacagtctgttttggcagggcagaaatttagcatctggagaggttggattttttccaagtgatgcagtcaagccttgcccatgtgtgcccaaaccagtagattattcttgccaaccctggtatgctggagcaatggaaagattgcaagcagagaccgaacttattaatagggtaaatagtacctg

SEQ ID NO: 202 - DNA, 460 bp, Homo sapien
  misc_feature (1)...(460): n = A,T,C or G
actacggaatatctcnaaaaactgcactagagacaaagacgtgatgttaatatcttttccccacaattattacggataaacagtagcaccaataaataaatgataacaaatattaaaattaaaaaaggagagagatttagtatgtagaattctctattttttcttgttttgtttttacatataaaaaacagaatagcaatgtctattttatcagaatcacatatatacataaacatatatatatatatatacacacaaatacaagttgccaaatatatatatagtatgtagatgtatattgaaaccttatttcaaaggaatgtgtgctggggagccaggggatcggggagggcagagctgagtgttagcaaaattaaatatctgttcaagataagctagtgactgtcaccgatcagggagagagagattggaaacatgaattttatatacaaaaaccggt

SEQ ID NO: 203 - DNA, 374 bp, Homo sapien
actgtccagtatagtagcccttagccatatgtgactactgagcacttaaaatgtggccagtcagaattgagatgtgctgtgagtgcaaaatacactcaaatctaagacttagtatggaagaaaaagaagataaggtgtttcattaataatcttttatattgattacatgttgaaatgatatttttaatatactgggttacataaactgttattaaaattaattttgcttgtttcttttttaatatggctactagaaaattaaaaattatgttgtggttcacattatatttctgttgaacaatgtggacatagataatctacagtcattacattagccttagaatttagcatcatacttttaagcactctggggt

SEQ ID NO: 204 - DNA, 293 bp, Homo sapien
aaaatgtctgaaggaatataaatgaagttgtcattagtagttatcttaggggtccgggattatagaggaacttttatcttctacatggcctttttctatagtgtttgaattttaattacaagaccagtgatttataaattcatacactccacagccccatccattacaatagcacataatataataacattagccatggacttacctaaattgcttttgtcatgtgtctgctggtgatgcccaacccagtgctctgcacccaggtcacactgtggctttgtcctctgcttatg

SEQ ID NO: 205 - DNA, 546 bp, Homo sapien
  misc_feature (1)...(546): n = A,T,C or G
actattgnnaaaatgaccaacaaaaactttaagaacagcctgaaatctgctggaaacttccctcatcccattattaggatgaccagggatcacttcaatagattttcaggtgagaaagctggaggataatttctaggattacaatatttttgttttacctaaggttggtcattaaaagaaagtaagatttaatttatttaacaagaagaaaataattcatttgactagtcatttaaacctattctatttaacagaagagggaacaattttgttcagtagtgacctcattagaagagcccattttgaagagttctaatgtatattctcaatatataattagcattcccccaaacccctaatgtaagttgtaaattaaacattatgttgtttactggcatttctattttctacttcagttctctttatttgaaacatgacaaaatttcatttacataagatttctatattataaagattaaaaatttaaaggaaaaatattggttttggtggtttaaaactaaaaaaaatggaagcatgatcattggt

SEQ ID NO: 206 - DNA, 195 bp, Homo sapien; identical to SEQ ID NO: 8

SEQ ID NO: 207 - DNA, 282 bp, Homo sapien
accacgttccttcaaagagtgaatctattgaaccctggggaatatagttgaccaaatgatgggtgtcctctctgagcttcatgttttcagcgaagacatctggtgccacaccagttcttgaatcaagccttgatttaagatcacataaacttgctgttattttatcaagagcagaccccggtgtagcatcttgtgtgactttaagagagtatagagtggcagccaaaccagaaccataagaaaacaccccaattctcttccctgctaattgctgaggtgagt

SEQ ID NO: 208 - DNA, 560 bp, Homo sapien
actctggtttcaagtagcacactggaaaagaaaattgaagatcttgaaaaggaagtagtaagagaaagacaagaaaacctaagacttgtgagactgatgcaagataaagaggaaatgattggaaaactcaaagaagaaattgatttattaaatagagacctagatgacatagaagatgaaaatgaacagctaaagcaggaaaataaaactcttttgaaagttgtgggtcagctgaccaggtagaggattcaagactcaatgtggaaaaaatattttaaactactgattgaatgttaatggtcaatgctagcacaatattcctatgctgcaatacattaaaataactaagcaagtatatttatttctagcaaacagatgtttgttttcaaaatacttctttttcattattggttttaaaaaagcattatccttttatctcacaaataagtaatatctttcagttattaaatgatagataatgcctttttggttttgtgtggtattcaactaatacatggtttaaagtcacagccgtttgaatatattttatcttggtagta

SEQ ID NO: 209 - DNA, 503 bp, Homo sapien
acctgtgggtttattacctatgggtttatatcctcaaatacgacattctagtcaaagtcttggtaatataaccaatgttttcaaatgtattctgtcatacaaagagcagatttttattgaacttgtgcaataactatattaccatacaatataaatattcatgaatagtttcccaagtctggagcgaccacatagggagaaaatgtaaatgtctcaatttttgttcacaaaagtatattttatcaaattgctgtaagctgtggatagcttaaaagaaaaaaagtttcctgaaatctgggaaacaagacatttaaagaatcagcaaaatttcaaataaaaaattatgaaaatattatcctcattagttcatttagtcccatgaaattaattatttttctctgcttgatcttggtggacagtttcatgaagctgtcagtttagttcattaaagttttggaaattctcagacagtgcagtggtatcagaaacttgtattcaagagt

SEQ ID NO: 210 - DNA, 343 bp, Homo sapien
acatacacacatacacacacacaaccccaacatgaacagtgtatacttgatatctgagggggatatgcagtaattttaacaatacatgtcgatggcctgaacaaaggtgaatgctgcctgtgttaagcattgcttaaaaaatctacttttaagcaaagcaagttgccttccttaggtcagccactgcctggtccgaccagtgcagcttggccagcctcactatgagtggtcttattcccttgtcctctccaggccgatatactaatatataggctcacaaggagctgtagggtttccctcctgccctcttaggtagagaagtataggcacttctctacccagt

SEQ ID NO: 211 - DNA, 296 bp, Homo sapien
acacagttgtgcctgccagcattgcaactccagtgccctcagtgaaacccgagtatcttaccctgctggtaagtggcaccaccgcatacatcagcctgaaagagctcggaggactgtcggaagggaaaaaagttttggtgacagcagcagctgggggaacgggccagtttgccatgcagctttcaaagaaggcaaagtgccatgtaattggaacctgctcttctgatgaaaagtctgcttttctgaaatctcttggctgtgatcgtcctatcaactataaaactgaacccgtaggt

SEQ ID NO: 212 - DNA, 253 bp, Homo sapien
acagccagaaaaattagaacttattatggatgaaatgaaacagattctaactccaatggcccaaaagtaagaaagttgtttttgttttgttcttaagaaatgacattcaaaggaggaaggttttccataactgttgcccagaagaggtagctatttcctgcttacaagtattaatctattctaaataagagtgcaaaagtgttggtttgaaaccattcttggtgcaaaaggagatttctttttctgatattgt

SEQ ID NO: 213 - DNA, 183 bp, Homo sapien
  misc_feature (1)...(183): n = A,T,C or G
accattggtnncccnttgattngatggtaagggagggatcgttgacctcgtctgttatgtaaaggatgcgtagggatgggagggcgatgaggactaggatgatggcgggcaggatagttcagacggtttctatttcctgagcgtctgagatgttagtattagttagttttgttgtgagtgtta

SEQ ID NO: 214 - DNA, 276 bp, Homo sapien
acctctcaacattaccaaaatcatttctttagagggaaggaataatcattcaaatgaactttaaaaaagcaaatttcatgcactgattaaaataggattattttaaatacaaaaggcattttatatgaattataaactgaagagcttaaagatagttacaaaatacaaaagttcaacctcttacaataagctaaacgcaatgtcatttttaaaaagaaggacttagggtatcgttttcacatatgacaatgttgcatttatgatgcagtttcaagt

SEQ ID NO: 215 - DNA, 202 bp, Homo sapien
  misc_feature (1)...(202): n = A,T,C or G
accattgntnnccaattgatttgatggtaagggagggatcgttgacctcgtctgttatgtaaaggatgcgtagggatgggagggcgatgaggactaggatgatggtgggcaggatagttcagacggtttctatttcctgagcgtctgagatgttagtattagttagttttgttgtgagtgttangaaaagggcgtacctgcc

SEQ ID NO: 216 - DNA, 488 bp, Homo sapien
acttttagatcacaaatttgcctttaagtaacacataatacacttaaggcagatttgccttacaggtggcctcagcttctaaacaccactacactgctttatataaaaaacaaaaatcacatagaagagaatctagtgacatctttcttggtattttaaacttaaaaactgcataataaattgagttcccataaaatttcgcccttgagataggaaacaaacactactactattttatagttgcctttatctgacttgattgatgcagttataatagtattaataacataatctttaaatttgtgagggaaaaccaatactttatattcactcctcataaaaggttcaacagcaagcataatgaggagccattataaaatcatattgctaagtattactttaactcataattctgcttatataagtgtatgcatatcacagttaacaaatactatttaattatcaagacatatgcaaaagtatttttt

SEQ ID NO: 217 - DNA, 195 bp, Homo sapien
  misc_feature (1)...(195): n = A,T,C or G
gcttntccgagggtaaaatagagacccagtaaaattgtaataagcagtgcttgaattatttggttncggttgttttctattagactatggtgagctcaggtgattgatactcctgatgcgagtaatacggatgtgtttaggagtgggacttctangggatttagcggggtgatgcctgttgggggccantgccct

SEQ ID NO: 218 - DNA, 349 bp, Homo sapien
acacatgtgttatctacctcaaggtaacaagagtatgtggcaaaacatataccacccatagtgcttcacaaaatgcacttctatttagccagcgtttattgtagtaaactattcttaataaaactcactcactgtttataaatgttctggtatgcattctttatagtgaagtgttaatacatcacatcttatttattttagcaaatcagtatattttctgtatttaattataaaaaattaacttagtttttaaaatttatttgcaaatatactttttccatttggcactatggtttgttgcctacctagctgcatctataatgtcagcttatcctaaggctgtccacgt

SEQ ID NO: 219 - DNA, 292 bp, Homo sapien
ttctttataactgacttagtcatttgccgcttagcagtttatatactgaaatgaaaacatcttgtggggaaaagtgactttagattatgaactcaattcaaatgaactctatttaaaatggggtcctattttggacaaaggaaattaagaatgtaaaagtcagaacagtcttgaggtaaaaagtgtgctttggcttaaaagggatacagtatattaattacatcttttattattattgtttatttcttagaatcatttctggctttctcaaaacaaaataatattaatgagt

SEQ ID NO: 220 - DNA, 451 bp, Homo sapien
acaagtcattactcccccttctcccatatgaacaagaattttttaacggtcagaatatattgggcatcaaattaaaaacttttttttcaaaagtctacagaatggatattggagcaaaaattacaaagtgggtcagatacaggtttttaaaaactgcattactgaatttaacaaaagtcagacactagaatcatatatttgctgcataaaagttgatttgatacctggtggtgattgaatttagtctcaaagactcataaataaaaatctgacttaagacgtagtcataccagtataccaattctcccatcactttgactttcggcagagagattagagcaaaaaatattcaggagaacagtggagttacattgtattatgtatgtttaatataatatcaattttaaggttaaggttaaggaaatcttaattttaaggttaaaccttgagt

SEQ ID NO: 221 - DNA, 484 bp, Homo sapien
actcgcggccgggcatggtggctcacgcctgtaatattgattttaaacaacctcagaaggaacgcaagcccagggtgcaaataacagcagactactgccctcctcaacctatttcccttaggctgtttcaggcccttctccctggtccctcattttccttgctcccaacacagcttactttttgcactgctaaatgtataatggaattcctaggattctgataaagccttgcttagaagactaaaagtcaatctacgacaaagatacttaacgagtcttagtgtcacctaagaatctcctaggcaaagcaatcttaaagggcagggaagatattatatttaaaatccaagctgcttttctaaaaagaagagatgatcacaaattacaagatcttcattatcataaaaaacaaataactattttgtcagacacctaaaacttgtcaagtaatttttaacatctcaatatgtaaaaagaacatact

SEQ ID NO: 222 - DNA, 273 bp, Homo sapien
acagggaggaatttgaagtagatagaaaccgacctggattactccggtctgaactcagatcacgtaggactttaatcgttgaacaaacgaacctttaatagcggctgcaccatcgggatgtcctgatccaacatcgaggtcgtaaaccctattgttgatatggactctagaataggattgcgctgtcatccctagggtaacttgttccgttggtcaagttattggatcaattgagtatagtagttcgctttgactggtgaagtcttagcatgt

SEQ ID NO: 223 - DNA, 617 bp, Homo sapien
  misc_feature (1)...(617): n = A,T,C or G
acagatgtgcaggaatgctaggtgtggttggttgatgccgattgtaactactatgagtcctagttgacttgaagtggagaaggctacgatttttttgatgtcattttgtgtaagggcgcagactgctgcgaacagagtggtgatagcgcctaagcatagtgttagagtttggattagtgggctattttctgctagggggtggaagcggatgagtaagaagactcctgctacaactatagtgctcgagtggagtagggctgagactggggtggggccttctatggctgaggggagtcaggggtggagacctaattgggctgatttgcctgctgctgctaggaggaggcctagtagtggggtgaggcttggattagcgtttagaagggctatttgttgtgggtctcatgagttggagtgtaggataaatcatgctaaggcgaggatgaaaccgatatcgccgatacggttgtataggattgcttgaatggctgctgtgttggcatctgctcgggcgtatcatcaactgatgagcaagaaggatataattcctacgccctctcagccgatgaacagttggaataggntgttagcggtaactaagattagcatggtaatta

SEQ ID NO: 224 - DNA, 465 bp, Homo sapien
acctgtgggtttattacctatgggtttatatcctcaaatacgacattctagtcaaagtcttggtaatataaccaatgttttcaaatgtattctgtcatacaaagagcagatttttattgaacttgtgcaataactatattaccatacaatataaatattcatgaatagtttcccaagtctggagcgaccacatagggagaaaatgtaaatgtctcaatttttgttcacaaaagtatattttatcaaattgctgtaagctgtggatagcttaaaagaaaaaaaagtttcctgaaatctgggaaacaagacatttaaagaatcagcaaaatttcaaataaaaaattatgaaaatattatcctcattagttcatttagtcccatgaaattaattattttctctgcttgatcttggtggacagtttcatgaagctgtcagttagttcattaaagttttggaaattctca

SEQ ID NO: 225 - DNA, 344 bp, Homo sapien
acagcaaagcgacccttggtgtcatagatcagacggaaattctctcccgtcttgtcaatgctgatgacatccatgaatccagcagggtaggttatatcagttcggaccttgccatcgattttaatgaaccgctgcatgcaaatcttctttacttcatctcctgtcagggcatacttaagtctgttcctcaggaaaatgatgagggggagacactctctcaacttgtggggaccggtggatggacgaggagcaaacacaccggtcaatttatccagcatccaatgctttggagctgccacccgcttcagatgcttcttgggaccacgagccatggctgcgacctg

SEQ ID NO: 226 - DNA, 501 bp, Homo sapien
  misc_feature (1)...(501): n = A,T,C or G
actgccaggtaacgctgttgtttccgttgagcctgaactgatgggtgacgttgtaggttctccaacaagaactgaggttgcagagcgggtagggaagagtgctgttccagttgcacctgggctgctgtggactgttgttgattcctcactacggcccaaggttgtggaactggcagaaaagtgtgttgttggagttgagcttgggcggctgtggtaggttgtggatacttcaacaggggctgctgtggtgccgggaggtgaaggtgttgtgtcacttgagcttggccagctctggaaagtggtagattcttcctgaaggccagcgcttgtggagctggcaggggtcagtgttgtgtgtagcgagccagtgctgctgtgggtgggtgtagatgcctccacgaggcctgaggttatggtgtcgtcaggtaagantgtggtttcagtgtcgcctgggctgctgtggaaggttgtagattgttgaccaagggatgaggctgtggt

SEQ ID NO: 227 - DNA, 455 bp, Homo sapien
accccacagaattcacatgggataatgatgctctcctccacagggtgtgaattgctcaggcccatcaaagagtctaactggttacttgcagcctgttgcaagaagttctggaagatgacatcaggttcctccacccctctgggggaagagctgccagtattgagtgaaggtaaggcacgtgaagggttacagcttgtctgatggtcaatcagcagttcctctgggtagagctcctcacaaaattcacaaggcaacatgatctcgtcagctgcaccctttatgtcactgagagacctgggaccgccatgagactggtcggcctcacatacggccctccagaagtcctgctctgccacactggaggcttggccttcattttgcagacttagggccaacatgaagtccaagtttgcactctcttcaccaccctctttggggggctgttggcctctatt

SEQ ID NO: 228 - DNA, 253 bp, Homo sapien
actgttacctgtttgtctcggaaagagtgagggaatcagcagggagtctgagatgtcatttctgttgtaataaatggagcttggatgaaatggcactatattatgactacagcagatggcccattttgaaacttgcattgaggaggctgcagaagtgttgagtgctgaggtatacccctatgttttcatccgattgctttctgctattataggaatgggacgcgagagataaagattctatccgacgagtagt

SEQ ID NO: 229 - DNA, 167 bp, Homo sapien
acctcatggattaccaagatttgctgaaccctattggtgttactggatcaaatccaaataaagaaactccatgcttagagttggagtttgactggttcagcagtgtggtaaagttcccagatatgtcagtgattgaagagcatgccaattggtctgtatcccgagaa

SEQ ID NO: 230 - DNA, 286 bp, Homo sapien
acaggaatatgttatgcaataaagtgaggaagagaaaaagggaataagaagggaggaatgtaactagagcagctcccaacagtttgcctatgtatttgccagcaccaaaatttgtagagtaagccacttacatttccactgctagtattaaggaaagacagcagtggtgatttttataaagtgagtatacatttatttttattctgatatgtgaatttttctttcacgagttaattaactggtaatttgtaaacagtgggaagaagattagaacaattatggaggt

SEQ ID NO: 231 - DNA, 304 bp, Homo sapien
tctgcttctaacgccttcatggtatgtggggttctgtatgccacccgtaccatactacaaatatttaaatgcaaaattaccaacctatatagcagttttatttgccctataggttgcatactaacttaagcattcatgtcaccataaaatgcctttagcatttctcaatgactggatgggaaattttcctttattgcctagctgcttgtgtttgagtggttgtcctatgagcaatgcatttggagttcttcagctttcactacttctctgttgcttgctaatcatgtaactactaaaatactgt

SEQ ID NO: 232 - DNA, 237 bp, Homo sapien
  misc_feature (1)...(237): n = A,T,C or G
acaggcacaganctctccacaccgntggccactgactgtttcttaaactgccccttggccttgaccatgatctccacgcggntgtgggagaacttctcaatgacagactcaatccagatcagtggcttgacctgggtgctgaggcggtatgacatgagctcaaagtcaccatcnnncgggatgaagganatggtgcggtcgttgtcaaagcgagagagccgcacgcactggtggaat

SEQ ID NO: 233 - DNA, 518 bp, Homo sapien
actcagctctgagcaggagtttcagatgttccccaagtctcggctcagctccgtcagcgtcacctactgctctgtcagtcaggacttcccaggcagcaacttgaatttgctcaccaacaattctgggacgcccaaagaccacgactcccctgagaacggtgcggacagcttcgagagctcagactccctcctccagtcctggaacagccagttgtccttgctggatgtgcaacgggttccttccttcgagagcttcgaagatgactgcagccagtctctctgcctcaataagccaaccatgtctttcaaggattacatccaagagaggagtgacccggtggagcaaggcaaaccagttatacctgcagctgtgctggccggcttcacaggaagtggacctattcagctgtggcagtttctcctggagctgctatcagacaaatcctgccagtcattcatcagctggactggagacggatgggagtttaagctcgccgaccccgatgaggtggcccgcc

SEQ ID NO: 234 - DNA, 130 bp, Homo sapien
  misc_feature (1)...(130): n = A,T,C or G
ggttttttttttttaagaggaaaacccggtaatgatgtcggggttgagggataggaggagaatgggggataggtgtatgaacatgagggtgttttctcgtgtgaatgagggttttannttgttaatgtgg

SEQ ID NO: 235 - DNA, 255 bp, Homo sapien
tgaaatgttaaggaagaagatagatccaattaaaaaaaattaaaaccaatttaaaaaaaaaaagaacacaggagattccagtctacttgagttagcataatacagaagtcccctctactttaacttttacaaaaaagtaacctgaactaatctgatgttaaccaatgtatttatttctgtggttctgtttccttgttccaatttgacaaaacccactgttcttgtattgtattgcccagggggagctatcactgt

SEQ ID NO: 236 - DNA, 474 bp, Homo sapien
acttttttgtttacttgtgaaaatggccatctttaagcatatttattttctgccactttatttaaaggcaagcaatattttcttgatcataaatattttgtaatgaaatacttcctcttttccagggctttgtatgcacttgtataattacattgatggcaatgtagagtttgaatttcagtctgtaaatacttttttggaaaatagaaatttttattgctttaaagttttggatatgggtggttttcttttccgggtttggtggaaagtaatttgagaactttaaggttgtctttttaactgctggcaaaatgttgattttttaatattagataaaacgagtaaacgaaattccccagaaattagtagtaagtggggtctttgtgggttgggaagtagttttaatgtagaaagacatttacatataagtctgtttaatttcaaaggagtttgtgaaaaaaaatccatggtgaa

SEQ ID NO: 237 - DNA, 238 bp, Homo sapien; identical to SEQ ID NO: 67

SEQ ID NO: 238 - DNA, 349 bp, Homo sapien
  misc_feature (1)...(349): n = A,T,C or G
acaaagacaaacnaacaaactncattggcatttaagccaatcaaaaaaggaaagaagagaaatccctggtctgattcanaatcagataggagcagtgacgaaagtaattttgatgtccctccacgagaaacagagccatggagagcagcaacaaaaacaaaattcacaatggatttggattcagatgaagattttctcagattttgatgaaaaaactgatgatgaagattttgtcccatcagatgctagttccacctaagaccaaaacttccccaaaacttagtaacaaagaactgaaaccacagaaaagtgtcgtgtcagaccttgaagctgatgatgttaagggcag

SEQ ID NO: 239 - DNA, 434 bp, Homo sapien
actgaatggctggagacaacactttatcagttttgacactgacaggagtggaacagtagacccacaagaattgcagaaggccctgacaacaatgggatttaggttgagtccccaggctgtgaattcaattgcaaaacgatacagcaccaatggaaagatcaccttcgacgactacatcgcctgctgcgtcaaactgagggctcttacagacagctttcgaagacgggatactgctcagcaaggtgttgtgaatttcccatatgatgatttcattcaatgtgtcatgagtgtttaaatcaagaggaagctgcatgaatgtaatcaacattccaactggagctctcctttgcttgtcctctttgccttcggtaatatgtataaacttacatcacgactttctcttaacagctgttgtaaagtttattactttatgt

SEQ ID NO: 240 - DNA, 224 bp, Homo sapien
  misc_feature (1)...(224): n = A,T,C or G
acccgagtgcagttggcagcccgtggctccaggtccttgggatccacaaggtggctcanaagactgctctccaggtggccccggggagcggtggaatcaaattgggcattgggcttatctaacagcaagggcagggccacggcaaatccagccatatccacagggaagggcctgctgggctcccatgctgtgcggaagcccactacccggccgtcctgtacctg

SEQ ID NO: 241 - DNA, 346 bp, Homo sapien
  misc_feature (1)...(346): n = A,T,C or G
acaaccaaaacaacgtccttagtatcttaaggtttaagatttccgaaaagaaaaaagccatgttctaacaaaagtgttcaccacagaaaaattaaacataggggaaggtaaacattaaagtttcaaaaaaacaggtaaatcatacagctgcttctgtgcttgatgttctaatctggcacaagtgtttcgtaactataatatacgttattatttttaaaaaatactgtcatgacaacagcttacattattaaatattgaggaacactttatatcaatttaactcatacttaaaaatgtaacatacgtaaattctatagctctatnnttttttttttttttggaatgt

SEQ ID NO: 242 - DNA, 411 bp, Homo sapien
ttttgagagccagaacggaagtcttggttttatttatagttgataacttacatccggcctgctcctcaggaagcacagcagggaggagacagagcccaaaggagacggcgacaaaaatgcccaaacccctgagctaatgtggtgactgagagcaagcctaaagctcccttctgagctccccagcagccaaagcaaagagagaaacagggtcctgcagcatgatgtcacagaaaaccagggaccctggagcctgggttccaataagaaccttacattctgacgccttagatttctccctggaaaatggggagaaaaatactgaattggttgggagggccatgcaacacacccagcacagtgtctggatgcatttcagaggccccaccagtctagggtctacagaaagacagt

SEQ ID NO: 243 - DNA, 429 bp, Homo sapien
actaaaatttttaaaggagagaaactttaacaaaaatcttgataattaaaaattcaaattgtgctagatagaatgtattccaaaatttctgctaaaaatttttgcttttagtttgtaagacataattcaggagaacctcaaagaaaaatttagcaattaagtttggaaaagctataaaagagacctttactttttgaacagacatttttccctttcccaaaatgtgtattattcaagaagcatatttataaatttcattaaagaaaatatcggccaggtgcggtggctcacacctaatcccagcactttgggaggctaaggtgggtggatcatgaggtcaggagttcaagaccagcctggctaacatggtgaaatcccccgtctttactaaaaatacaaaaattagctgggcgtggtggcaggtgcctg

SEQ ID NO: 244 - DNA, 464 bp, Homo sapien
acatcaaagattacatgaaatcaatcaaagggaaacttgaagaacagagaccagaaagagtaaaaccttttatgacaggggctgcagaacaaatcaagcacatccttgctaatttcaaaaactaccagttctttattggtgaaaacatgaatccagatggcatggttgctctattggactaccgtgaggatggtgtgaccccatatatgattttctttaaggatggtttagaaatggaaaaatgttaacaaatgtggcaattattttggatctatcacctgtcatcataactggcttctgcttgtcatccacacaacaccaggacttaagacaaatgggactgatgtcatcttgagctcttcatttattttgactgtgatttatttggagtggaggcattgtttttaagaaaaacatgtcatgtaggttgtctaaaaataaaatgcatttaaactcgaaaaaaa

SEQ ID NO: 245 - DNA, 375 bp, Homo sapien
actccacattgagaagcatctccgtgaggttgctgcgggccagcacatacatgagcacaggcaggaagtcatccgccccatagggcttccctgggttgccgagggccatggagtcgtagatgagtttgcaggtcttgagcaggatggagatcttcttctcaggtgagtaggccttgtgcatgctggtgaacttctgcaggatcttctccatcatgggcacctccggcacgctggtggtcacacctaggtcagtggtggtggtggccaggatcactaactggttctccttgagctgctgcagcgaaccatccttgctgtggatctgatgcaggcatgagttgatggcttccttcaggggcttcaggacacatttgt

SEQ ID NO: 246 - DNA, 99 bp, Homo sapien
  misc_feature (1)...(99): n = A,T,C or G
cttagtaaatggaaatatgcagaactacgtgataccatcaatacttcttgngatattgagctcctggcagcttgcnnagaagaatttcataggagacta

SEQ ID NO: 247 - DNA, 334 bp, Homo sapien
  misc_feature (1)...(334): n = A,T,C or G
actgatttncatcnttgcatttacaactgctacaaaaatgccagcactccatcgacatgaagaagagaaattcttcttaaatgccaaaggccagaaagaaactttacctagcatatgggactcacctaccaaacaactttctgtcgttgtgccttcatacaatgaagaaaaacggttgcctgtgatgatggatgaagctctgagctatctagagaagagacagaaacgagatcctgcgttcacnttatgaagtgatagtagttgatgatggcagtaaagatcagacctnaaaggtagcttttaaatattgccanaaatatggaagtgacaaagt

SEQ ID NO: 248 - DNA, 308 bp, Homo sapien
  misc_feature (1)...(308): n = A,T,C or G
ggacgggaggcgagcaanntggcgcanncgcagggcacccggaggaaagtctgttactactacgacggggatgttggaaattactattatggacaaggccacccaatgaagcctcaccgaatccgcatgactcataatttgctgctcaactatggtctctaccgaaaaatggaaatctatcgccctcacaaagccaatgctgaggagatgaccaagtacctaacaaacccacaggtcctaaactaccaaacctgcattaaaaatttcggttggggcgacctcggagcagaacccaacctccgagcagt

SEQ ID NO: 249 - DNA, 408 bp, Homo sapien
actggaaaagatgggaaatacaaaagtgtatatgtaggagaagaaacaaatatcactttaaatgatctcaagccagccatggattaccatgcaaaagtccaggcagaatataattctataaagggaactccttcagaggctgaaatctttaccaccttgagctgtgaacctgatatacctaatccaccaaggatagccaatcggaccaaaaattcactcactttgcaatggaaggcacctagtgacaatggttctaaaatccaaaactttgtattagaatgggatgaaggaaaaggaaatggagaattttgtcagtgttacatgggctcacagaaacaatttaaaattactaaactttcaccagcagtgggctgtaaattcagactatcggccagaaatgactatggt

SEQ ID NO: 250 - DNA, 563 bp, Homo sapien
  misc_feature (1)...(563): n = A,T,C or G
acggtagaactgctattattcatcctatgtgggtaattgaggagtatgctaagattttgcgtagctgggtttggtttaatccacctcaactgcctgctatgatggataagattgagagagtgaggagaaggcttacgtttagtgagggagagatttggtatatgattgagatgggggctagtttttgtcatgtgagaagaagcaggccggatgtcagaggggtgccttgggtaacctctgggactcagaagtgaaagggggctattcctagttttattgctatagccattatgattattaatgatgagtattgattggtagtattggttatggttcattgtccggagagtatattgttgaagaggatagctattagaaggattatggatgcggttgcttgcgtgaggaaatacttgatggcagcttctgtggaacgagggtttttatttttttggttagaactggaataaaggctagcatgtttatttctaggcctactcaggtnaaaaaatcagtgcgagcttancgctgtgatgagtntncctgcaaagatggtagagtag

SEQ ID NO: 251 - DNA, 490 bp, Homo sapien
acccgggaggcaccccgtcagcccgtgtgccgggggctcagcctggagctcttggaggaaaatgctacctaataggcagttccgtaattaggcagctaaaagtttttcctaggcatttatgcaagcctcccaggccattttcagcactcatcgaagactctattcctacatgtagtcccgaagttggaggccctgagaacccctacctgatagacccagagaaccaaaacgtgaccctgaatggtcctgggggctgtgggacaagggaggactgtgtgctcagcctgggcagaacaaggactgaagcccacacagccctgtcccgactcagggccagcatgtggattgaccgcagcaccagggctgtgtctgtgcacttcactctctataaccctccaacccaactcttcaccagcgtgtccctgagagtggagatcctccctacggggagtctcgtcccctcatccctggtggagtcattcagcatctt

SEQ ID NO: 252 - DNA, 202 bp, Homo sapien
ttttttttgcagagtctgatcttatttatttgttactcaaaaaatcttatttctgactggattcagacttagaagtagaagctcgcagagaggaaagtctgcgtctcttcgcaatttgttcctggcgcttctccttagcctccttcattctcttggccaaaagtttagcatattctgcagcctcttctttatttttcttggt

SEQ ID NO: 253 - DNA, 426 bp, Homo sapien
acttccagctgatattggtgccctttgattgaaaatgacccaaatcaacccttggttaacgtaggcattaaaagaatgtattgagagaaccttggacatctcagagacaccaaccaagaaccaaacaatccagctttgaaagggcaaggatcagagtggctctgagcttcagggagcaggaattgagaaagatgaggatgtcttcatgtcacgtggctcaagatgccaattctagggagaaaaggtgtatcgagcccagcctgagttttttaccaccctcaaaaaggtgtggacagagctccttaatcagcagatgatcccatcaagaacacagagaggagaggagatcaatacccaaagagtagcaaaggtcctattagcaaagaatgttaaaagagatgctaggcaggcaaaaataatagcagt

SEQ ID NO: 254 - DNA, 195 bp, Homo sapien; identical to SEQ ID NO: 8

SEQ ID NO: 255 - DNA, 195 bp, Homo sapien; identical to SEQ ID NO: 8

SEQ ID NO: 256 - DNA, 533 bp, Homo sapien
actttgttatttttccatcactaaaggccaatcagaatttggaaccatgctgctacccaagaaatctaatggaatgaattagttctgtagatgacaatttcttcacccatttatgagacctaaatcttttccataacactcatgtattcagtataacaacatactaactgaaagagggacctgattgtttaaagtttgattgcagacactgtagaacataactcattatgtttcagataaggtaactcctagatatcaaactaatttgttggggtagagattttacaagtcatgccattagaagattttctctgatattatatgtgcagttcagttacaagataaaatcatgtttttttaacaaaagagataaaatacaattgaagcaaaaaataacagctagtatataatatatacagtctgtatttgcttttcacagtaggcctgatgactaaaagatatgctttattacacgctattttcacctcttgaaagtcaaaggtgatgattaatttcatttagcagggaagtgg

SEQ ID NO: 257 - DNA, 356 bp, Homo sapien
gggcacgacactggaggtgggctgcagcggggacatgctcactatcaacgggaaggcgatcatctccaataaaggcatcctagccaccaacggggtgatccactacattgatgagctactcatcccagactcagccaagacactatttgaattggctgcagagtctgatgtgtccacagccattgaccttttcagacaagccggcctcggcaatcatctctctggaagtgagcggttgaccctcctggctcccctgaattctgtattcaaagatggaacccctccaattgatgcccatacaaggaatttgcttcggaaccacataattaaagaccagctggcctctaagtatctgt

SEQ ID NO: 258 - DNA, 387 bp, Homo sapien
  misc_feature (1)...(387): n = A,T,C or G
acggccagggctattggttgaatgagtaggctgatggtttcgataataactagtatggggataaggggtgtaggtgtgccttgtggtaanaagtgggctanggcatttttaatcttagagcgaaagcctataatcactgcgcccgctcataaggggatggccatggctaggtttatagatagttgggtggttggtgtaaatgagtgaggcaggagtccgaggaggttagttgtggcaataaaaatgattaaggatactagtataagagatcaggttcgncctttagtgttgngtatggctatcatttgttttgaggttagtttgattagtcattgttgggtggtaattagtcggttgttgatgagatatttggaggtggggatcaat

SEQ ID NO: 259 - DNA, 253 bp, Homo sapien
acaagctccagaggagcaattgggtctttaaatatacacaagtatttccatcaaatgaattttcacccttacatccaaatagacctaagcggttaaaaacataagaaaaataagagctattagctatgtattaactgagaaaccacatacaaaccaaagaatatggaagagagaaagaagggctgaaaggccaaaggttgaaggggtagggagatgtaaaagagttgggaacaaagcccatcacacttgatgt

SEQ ID NO: 260 - DNA, 474 bp, Homo sapien
acagagatcggatcacacaagcccggagacagcgcagcttctccattgactctggtcgcagacgcaaaggcagggaagcatccagcgtgtagtgcctgaaacatgacacattactcctaccaatatgtgacctgtctctcctgctctaggtcagttttctaagactcctggtctctgtatgaactttactgcactattccactggccagtagatagcctgtccccagtgctacttgacctcttggcgacttttacgtctttgccttgtaatccggcagttctccatccatttttaaagttgaagtcctcactttttcactgaacaaaagagcaaactctgaattggtatcggtatattatgctttagctgctcaaaaagaacctgtcctggaggaacctatactggcgaagagccaccaggttctccagtcagatctcacagtgagtttctccactcctttctacttcaacatt

SEQ ID NO: 261 - DNA, 446 bp, Homo sapien
acaacgatctgggcatgggacagaatttaataaacagaagcatcttgaagctgctgataagggacattcaccagcacaaaagcctaaaactagcagtggaacaaaaccatcagttaaacctacaagcgctacaaagagtgattcaaatctaggaggacattctattcgttgtaaatcaaagaatcttgaagatgacactttgtcagaatgtaaacaggtgtctgataaagctgtttctctccagcgaaagcttcggaaagaacagtcattgcattatggttcggttcttcttataactgaattaccagaggatggttgcactgaagaagatgtgagaaaattatttcaaccatttgggaaagtgaatgatgtcctaattgttccatatagaaaagaggcttacctagaaatggaatttaaagaggcaattactgcaattatgaagt

SEQ ID NO: 262 - DNA, 278 bp, Homo sapien
gtgaaaactacccctaaaagccaaaatgggaaaggaaaagactcatatcaacattgtcgtcattggacacgtagattcgggcaagtccaccactactggccatctgatctataaatgcggtggcatcgacaaaagaaccattgaaaaatttgagaaggaggctgctgagatgggaaagggctccttcaagtatgcctgggtcttggataaactgaaagctgagcgtgaacgtggtatcaccattgatatctccttgtggaaatttgagaccagcaagg

SEQ ID NO: 263 - DNA, 90 bp, Homo sapien
taataaaaatacaaaaaattagccaggcgtggtggcatgcgcctgaggtgccagctactcgggtggatcatgagatcaggagatcgagac

SEQ ID NO: 264 - DNA, 448 bp, Homo sapien
  misc_feature (1)...(448): n = A,T,C or G
actcaaggtttaaccttaaaattaagatttccttaaccttaaccttaaaattgatattatattaaacatacataatacaatgtaactccactgttctcctgaatattttttgctctaatctctctgccgaaagtcaaagtgatgggagaattggtatactggtatgactacgtcttaagtcagatttttatttatgagtctttgagactaaattcaatcaccaccaggtatcaaatcaacttttatgcagcaaatatatgattctagtgtctgacttttgttaaattcagtaatgcagnttttaaaaacctgtatctgacccactttgtaatttttgctccaatatccattctgtagacttttgaaaaaaaagtttttaatttgatgcccaatatattctgaccgttaaaaaattcttgtttcatatgggagaagggggagtaatgac

SEQ ID NO: 265 - DNA, 314 bp, Homo sapien
acagtagggaacaaccatttttccgtgttcacaatttgtctttggcggatagtatcagcaccactgtgagtgacataggcagcatcttatggtgcaatttcaagggcagagggcaggtgtcccctgcaccacattccctccccacagctaccgcccctaccccagggacattctacacaaacacaccagcatttggcttaagggatccttgttggaatgcaaacggctccgattctgagtagaatttcagaagcctttttgagtcgttactcggggaaggggagaagatgagggatgggaagatctagtcctgt

SEQ ID NO: 266 - DNA, 319 bp, Homo sapien
  misc_feature (1)...(319): n = A,T,C or G
actaatgtatcaacttattctgcaggatagacctcctacataccaaccccaggattacagtttttcttctgtttaaaactaggatgttcagtagaaatggggtttctatttgcagnnttgttacaaaccantttcctctcacaaatagctaatatctaagaccatgactcaaactatcaaataggaatagaaagagaacacacagttttgaacgcaaatagaaaaggcntcctaanaatgttctttataggccacntgcttgctttcagtaaaaataacattttctcaaaacttttcaatctgatttttaatagcttgt

SEQ ID NO: 267 - DNA, 432 bp, Homo sapien
acaggacagtaaaggaggcagttaatctgtaacaaacatcagtggttgggaggcaggaggtctggtctcttgatctttcctagtcatttacagaacaagaacagtgaggaaaagagttaatgtgttgtctaagaaggagaaatcaccaacgttcaagttgccagggcttaacttcctccttgacataataaatgtagagggtcttgaaatcctattttcttttacatgatcctatatatcaacttgaatagaactaatgtttacttttgaagaaaaatttaaattagaatggttgtcttaagtaaaggaggaagctttaaacatgatcctatatatcaacttgaatagaactaatgtttacttttgaagaaaaatttaaattagaatggttgtcttaagtaaaggaggaagctttaaaagtattctaatggt

SEQ ID NO: 268 - DNA, 214 bp, Homo sapien
actaaaatgtattgtttggtgacaagaactgcaataaaaagataaatgattttctgaatgttgtggcaaagcagtctatttccactgcaatttctgctactattagcttaaaaattgctgagacaaaggacaaccttctgattatgctgctgagatctaatgcaaagtcctctcagagcttcactacacataaacattccagttataaaaatgt

SEQ ID NO: 269 - DNA, 365 bp, Homo sapien
  misc_feature (1)...(365): n = A,T,C or G
ctttaattgtnaagtaaaagctataaagcagtatttttcttgacaaatggcatatgttttccacttctttgcatgcgtttaagtcagtttatacacaaaatggattttattttttagtttaactgtgtttctccgacagctcacctntccctgaccagccagccatttncttcctgtgctccacnttcttctgtgtgattaaaataagaatattatttttggaaatatgcaactccttttcagagatcaggagggatttatgtancancntatttttactgcaaaagtaattcactggaaaaaaaatgtaatttgtaagaaagctttatttttatctcagctntatgtaaagttaaagttactgt

SEQ ID NO: 270 - DNA, 401 bp, Homo sapien
actgcctcttactacaagatttgcttacccgggagttagatagcaagcatgggaaatgcctggcacacagaatatatggaattagtgttaggattttagtaacttcacagtcggaaagaggaaaataggaagagctgttcgtatagggtagactataggagagaatgcaaattttgaaagctacatcatcaaggattaaaattttgctgctagctttgtctctataataatgtggtcatctagtcttaatgcttattccttcaaaaagttcattcttttcatttttctccctttgtgcctaatgctcaatctcttgcactagtttcggaagtggtcttcttttatgtctgccctatatgctgttgttaaaactggtattgaaatgcacttttattcatggt

SEQ ID NO: 271 - DNA, 210 bp, Homo sapien
  misc_feature (1)...(210): n = A,T,C or G
acttctattgggctggttccttcaccatttccaaaggggttctggagaccttgcaggaacaggaacagcaccttanccaagagggttccaggcctcctgcctaggcctgggctctcctcgttaggttcccaggaataaattgagttcccattggcagcacttgcaggtattgctagtccacggcaagatctgtcttagggattttctggt

SEQ ID NO: 272 - DNA, 468 bp, Homo sapien
  misc_feature (1)...(468): n = A,T,C or G
acatttacaaagatgcgttcaaatagtgctctaagagttttgttcagtggctcacttcggctaaaatgcagaaatgcatgctgtcagcgttggtatttcacattcaatggagctgaatgttcaggacctcttcccattgaagctataatttatttggaccaaggaagccctgaaatgaattcaacaattaatattcatcgcacttcttctgtggaaggactttgtgaaggaattggtgctggattagtggatgttgctatctgggttggcacttgttcagattacccaaaaggagatgcttctactggatggaattcagtttctcgcatcattattgaagaactaccaaaataaatgctttaattttcatttgctacctctttttttattatgccttggaatgggttcacttaaatgacattttaaataagntttatgtatacattctgaatgaaaagcaaagctnaa

SEQ ID NO: 273 - DNA, 446 bp, Homo sapien
caggaattctgaattaagcacagagttgaagtttatacccgtttcacatgcttttcaagaatgtcgcaattactaagaagcagataatggtgttttttagaaacctaattgaagtatattcaaccaaatactttaatgtataaaataaatattatacaatatacttgtatagcagtttctgcttcacatttgattttttcaaatttaatatttatattagagatctatatatgtataaatatgtattttgtcaaatttgttacttaaatatatagagaccagttttctctggaagtttgtttaaatgacagaagcgtatatgaattcaagaaaatttaagctgcaaaaatgtatttgctataaaatgagaagtctcactgatagaggttctttattgctcatttttttaaaaaatggactcttgaaatctgttaaaataaaattgt

SEQ ID NO: 274 - DNA, 367 bp, Homo sapien
ttttttttatcagtagcctatttcagatttattaaaaaacacataggtaacgagtcagagctttggctaggaatgatttggaaaagaactgaaggcataattccacaggacattcacagttgtgtgctagagacagagaggagcaggaaagtgttttagaagcatttgcggtggacaatggaaggcccggcttcatcgtattcctgtttgctgatccacatctgctggaaggtggacagagaggccaggatggagccaccgatccagacagagtatttgcgctccggaggggcaatgatcttgatcttcatggtgctgggtgctagggccgtgatctccttctgcattcggtcggcaatgccagggt

SEQ ID NO: 275 - DNA, 466 bp, Homo sapien
  misc_feature (1)...(466): n = A,T,C or G
actctgaggctnntaggagggtaaaatagagacccagtaaaattgtaataagcagtgcttgaattatttggtttcggttgttttctattagactatggtgagctcaggtgattgatactcctgatgcgagtaatacggatgtgtttaggagtgggacttctaggggatttagcggggtgatgcctgttgggggccagtgccctcctaattggggggtaggggctaggctggagtggtaaaaggctcagaaaaatcctgcgaanaaaaaaacttctgaggtaataaataggattatcccgtatcgaaggcctttttggacaggtggtgtgtggtggccttggtatgtgctttctcgtgttacatcgcgccatcattggtatatggttagtgtgttggttagtaggcctagtatgaggagcgtttatggagtggaagtgaaatcacatggctnggccggaggtcatta

SEQ ID NO: 276 - DNA, 242 bp, Homo sapien
acctaagatcattttcctgaaagccaaaccaaacaacgaaaaacaagaacaactaattcagaatcaaatagagtttttgagcatttgactatttttagaatcataaaattagttactaagtattttgatcaaagcttataaaataacttacggagatttttgtaagtattgatacattataataggacttgcctattttcatttttaagaagaaaaacaccactcattttataaaatatagt

SEQ ID NO: 277 - DNA, 149 bp, Homo sapien
  misc_feature (1)...(149): n = A,T,C or G
accattggtggccaattgatttgatggtaagggagggatcgttgacctcgtctgttatgtaaaggatgcnnanggatgggagggcgatgaggactaggatgatggcgggcaggatagttcagacggtttctatttcctgagcgtctgag

SEQ ID NO: 278 - DNA, 112 bp, Homo sapien
  misc_feature (1)...(112): n = A,T,C or G
ataaaaatcaatcagtaggaatgtcattttaaaaagtaaaatagtgggacggttgtggtggctcatgcctgtaatcccancactttgggaggctgaggtgggtggatcattt

SEQ ID NO: 279 - DNA, 208 bp, Homo sapien
actgtaattttattttaatgtattttgatttatgattatttattagttttttttaaatgcttgttctaagacatttctgaatgtagaccattttccaaaaaggaaactttattttcaaaaacctaatccgtagtaattcctaatcttggagaataaaaaagggcggtggaggggaaaacattaagaatttattcattatttctcgagt

SEQ ID NO: 280 - DNA, 172 bp, Homo sapien
  misc_feature (1)...(172): n = A,T,C or G
accattggtggcnnattgatttgatggtaagggagggatcgttgacctcgtctgttatgtaaaggatgcgtanggatgggagggcgatgaggactnngatgatggcgggcaggatagttcanacggtttctatttcctgagcgtctgagatgttagtattagttagttcctg

SEQ ID NO: 281 - DNA, 516 bp, Homo sapien
accacgaagtcaatacttctcagtgagtagggaaagcaaaatacttcctcaatagcagggaaaaaaaagcaagagaaagactgaatttagaaaaaaaaagacaactgttaaagaaaatgtttaagtcaactttttttttttttttagacaaggatattgcaactatcacttaaagtctggtggcacattctttagtaggtccttaaggcaatatatttaaattaatttacaatttgatttgatgttaaagtttttttaaacatcacctcaaaatagatgctcaaaataatgccctcacaatagcctttgtaaaatgtattcagatgtttgataaaaaataatggtggctttatattacagtagtgctcattagcaccactataattaagggtctaccaagtttccagcaaaaccacctgtttcttaggagtttcaccataaaagatcacattggctttaaccagttgggtagcgcacaaaaaagcaatttttatcagttgctggtgctttttttgt

SEQ ID NO: 282 - DNA, 390 bp, Homo sapien
acttagtcacctgcaaaaggagttaggaaaaacatttttaagactgcttgctggacaaaagactttcaagattccttacttgtggctaaaacattgctcaaaaaggataaacccacataagggccatggttgcctcttctttttcttattcagaaacaaaatcaccccccatacaccaaaaaacaaactgaaaaccaaaaacaacaacaaaaaaacaaaacccaaagccaaaggaatcccaatttgattcctatcaacccctcatgggaaagactaggagtctctgccatcgacctctagacaggacttccctggagtctgcaaaagcaagaacccgagagataagtgcctgtcacttacgtggccaattcagatgggttgcctaattat

SEQ ID NO: 283 - DNA, 198 bp, Homo sapien
  misc_feature (1)...(198): n = A,T,C or G
acagttggaatccatggcagttttatggaggccaaatatatcagatgaataggctaatttccctgagttgctggccttattagtccctactctgttgccccctgnntacctaatgcatgttcaaaaggtatagttttcatcacctgcttgatcttgattttcagacagcatcaaatcagttgcaaaacaaatccaagc

SEQ ID NO: 284 - DNA, 290 bp, Homo sapien
acttattcgaatgatatacttgtgagctgttccatggtcataatcatccccaggagctgtccaagtcagattaatgagactgcccccgtgaatttccgccttcaggtcggtgatttggccaggtgggaagagatcaggtatgggagcatttgggacatcagaagccacaaatgagcctcccgaggatgttctgctgaaacacacttgcttgtgttgaacatcatccttattaatttcaggtcttggtggattccattgtatttcatcattctcaatccagccaggtatgt

SEQ ID NO: 285 - DNA, 551 bp, Homo sapien
  misc_feature (1)...(551): n = A,T,C or G
acaaagaagcagaagtgtaattttccttttcccagcatgacgaaaaattggagttctgccatttgagcagcttactggaaagatccagccttacttgtcttaaattgtccaacaaggtgactcattgcccggcaaacacttttaccctcagatgttactcatgatattataaaatatgaggccagtgctcaggtttgcatcataagtgagctatccctgaagggttttaattacttatttggcgtcctgattatatttgcaaacttctttataaaaggtgaaaaaagcacacaaaagagagggtgtcttcatattaaaccttcacaaccttcatgatttcataggattattttggaaatatagcacttgactttatgaaaggatctgggctaggtatattaggggtagttgccaataacctgaagaagctggcattgtttacagaaacagatcaagggctatgatttatgtcattttatagcagcagtatctattaatacatgccttttcctcccatncacctnccccgcacacacacaaaagatgacctg

SEQ ID NO: 286 - DNA, 409 bp, Homo sapien
actaacaaaggaaaaaactatactgaagaagaagatcgttttctgatttgtatgcttcacaaacttggatttgacaaagaaaatgtttatgatgaattgcgacagtgtattcgcaactctcctcagttcagatttgactggtttcttaagtccagaactgcaatggagctccagaggagatgtaataccttaattactttgattgaaagagaaaacatggaactagaagaaaaggagaaggcagagaaaaagaaacgaggaccaaagccttcaacacagaaacgtaaaatggatggcgcacctgatggtcgaggaagaaaaaagaagctgaaactatgaatatgtttttgtttcataatcactaactttaaaccagtagttctttaatttacgggtcttcataagatgt

SEQ ID NO: 287 - DNA, 331 bp, Homo sapien
  misc_feature (1)...(331): n = A,T,C or G
acttatgtgttnatctaacagttcacttccatttttctagtctggattttttgagtatttaggaaagagagctattaaaaactctggggatttctcaatgtgactaactctaatttttctaattataactgcctttaattaacataatattaacttttgctgaggtttatgagattttctcaccccacatcgctcccctttttttaaaaaggactgttttgctagtgtgataatgaataggtaagatatgagataattgcaacattgtctagttctagtatggtaactattnttgaaatggtattgaaaaataccgttaattcaaattgac

SEQ ID NO: 288 - DNA, 509 bp, Homo sapien
  misc_feature (1)...(509): n = A,T,C or G
acctgtgggtnnattacctatgggtttatatcctcaaatacgacattctagtcaaagtcttggtaatataaccaatgttttcaaatgtattctgttatacaaagagcagatttttattgaacttgtgcaataactatattaccatacaatataaatattcatgaatagtttcccaagtctggagcgaccacatagggagaaaatgtaaatgtctcaatttttgttcacaaaagtatattttatcaaattgctgtaagctgtggatagcttaaaagaaaaaaagtttcctgaaatctgggaaacaagacatttaaagaatcagcaaaatttcaaataaaaaattatgaaaatattatcctcattagttcatttagtcccatgaaattaattattttctctgcttgatcttggtggacagtttcatgaagctgtcagttagttcattaaagttttggaaattctcaggacagtgcagtggtatcagaaacttgtattcaagagtacctcgg

SEQ ID NO: 289 - DNA, 257 bp, Homo sapien
acccttccgctcacctatgcccatgtgcctgcccttccggcgggccaaggtgtttttccggcatcgagcccgggaatggaccgtcacaggcttgcggatgatcagcccatctttgatgagcttccggatctgctgacgggagttggcattggcgatttcattggtctcattggggtctaaccagaccttcttcttgccacagcggaggacactagaggcgagcctcttctgaagcctgagcatactcatggctgcgg

SEQ ID NO: 290 - DNA, 75 bp, Homo sapien
  misc_feature (1)...(75): n = A,T,C or G
accttctcaaaccncatttcatgangcggnctgatcgaacatttgaccccttctctgaaactcctgttgatggtg

SEQ ID NO: 291 - DNA, 226 bp, Homo sapien
  misc_feature (1)...(226): n = A,T,C or G
tttttttttttttttttttncgctctaaagatactttttatttaaatattttatgangatacatatacaaatataatcttccaaaaaacaaatgtaaaactaatacaaatcactttttcaggaacaaagaaaatcatttanaaaatgtgattatgctaaaagaggcaggttaggtttccaaggnctgctcaaggtggaagcttaanaccaacttttgtttgagtac

SEQ ID NO: 292 - DNA, 513 bp, Homo sapien
  misc_feature (1)...(513): n = A,T,C or G
cttcttcagcacatgccnaagctgttcctcacggcctgtgagacaagagcatcttggatgtaggacaatggaagagttagatgccttattggaggaactggaacgctccacccttcaggacagtgatgaatattccaacccagctcctcttcccctggatcagcattctagaaaggagactaaccttgatgagacttcggagatcctttctattcaggataacacaagtcccttgccggcgcagctcgtgtatactaccaatatccaggagctcaatgtctacagtgaagcccaagagccaaaggaatcaccaccaccttctaaaacgtcagcagctgctcagttggatgagctcatggctcacctgactgagatgcaggccaaggttgcagtgagagcagatgctggcaagaagcacttaccagacaagcaggatcacaaggcctccctggactcaatgcttgggggtctggagcaggaattgcaggaccttggcattgccacagtgcccaa

SEQ ID NO: 293 - DNA, 524 bp, Homo sapien
  misc_feature (1)...(524): n = A,T,C or G
acttacaaccacaatagcatactgtataatttagtggacttagttatttcaaaagatattatnccacttccctgctaaatgaaattaatcatcacctttgactttcaagaggtgaaaatagcgtgtaataaagcatatcttttagtcatcaggcctactgtgaaaagcaaatacagactgtatatattatatactagctgttattttttgcttcaattgtattttatctcttttgttaaaaaaacatgatttcatcttgtaactgaactgcacatataatatcagagaaaatcttctaatggcatgacttgtaaaatctctaccccaacaaattagtttgatatctaggagttaccttatctgaaacataatgagttatgttctacagtgtctgcaatcaaactttaaacaatcaggtccctctttcagtttagtatgttgttatactgaatacatgagtgttatggaaaagatttaggtctcataaatgggtgaagaaatttgtcatctacagaactaattca

SEQ ID NO: 294 - DNA, 430 bp, Homo sapien
acaaaattctttctcttgaattagtgcacacagagttgcctgtgtgcagtgaggaatgaatccatagacaaggagtcgatcattgagaaacaaggacggcacctgggctggggcctgcagggcctcgggcacatctggattgagttgccgccatttgacggagacagagtggcaactcggagaacatagcctggtcatttggtcttctatctgttttctccaactatgcttggattttgcattaaaatattcaaatactccggcaccacactgggacaaaatccttaagacgtgacgatttgctgtagaaccgataccgcaggcgaataacctggtgtgcgggcggctcctcttcacgagctgtaatgtcaggctctcatcctggaggtgcccatcagacaccaggaggatgttccgtgaccctcgagca

SEQ ID NO: 295 - DNA, 213 bp, Homo sapien
acatggtggtcaccactgagcccctcacccaggccgtggtagacaaaactctccttctggtggtgctgttactcggggtgacccttttcatcacagtcttggttttgtttgccctgcaggcctatgagagctacaagaagaaggactacacccaggtggactacttaatcaacgggatgtatgcggactcagaaatgtgaggggggcgggggc

SEQ ID NO: 296 - DNA, 140 bp, Homo sapien
accacagtttaatagttttgtgatagttcaataactgtcatttgctttaatctacagaattttaaaaaatctaaataaaactattacgctggccagataaaatagtaacaaaaaaagtaaagagatataaaacaaactgt

SEQ ID NO: 297 - DNA, 130 bp, Homo sapien
  misc_feature (1)...(130): n = A,T,C or G
accgcggnngntaaacatgtgtcactgggcaggcggtgcctctaatactggtgatgctagaggtgatgtttttggtaaacaggcggggtaagatttgccgagttccttttactttttttaacctttcctt

SEQ ID NO: 298 - DNA, 405 bp, Homo sapien
acatttaaggcttttaaatgtggaaaaaaaaattaaaaccaaagaacccccaaatccaaacccctaaccaacacaagtagtatagcaatgttaagcatctcctatttctgatgcttatttggcgcaacttccagtgtcaaaacccaaataattcctaaactaaaaagattagtttagtgaaattttaattacataaattcttcaaagcataaacttggaatttttgtcttggaaatgttataaaatttttaatagcaaaacataggaataaaaacatattaacaaaatgtattcaatcatttacattacaaacaaggaatctgcagttcattgttgtagcctgacaaaagaaatcatatctaccattaagaatctatgcacaatgtgattgcaaatatgtacagt

SEQ ID NO: 299 - DNA, 554 bp, Homo sapien
  misc_feature (1)...(554): n = A,T,C or G
accgtgggagcagggaaattggttttttaaaaagcaactgtttaattgcttaaataagctatgtattaaatctgtctccagttagggctatcttcctagcataggccccttaagtagcatgggggatatattttttgctataacgtaaaaattttcctttaaccactgccctctcctttctccttcaaggttctttccccctcagttttgttgttgtcttactctggagatgccaagtgtattttttctttctatgtaattttagattcgccttacaatgtaaatcttcacattggagataatattggttggaccttgcccatcttcactctagccttcgtatttgtgaaggactcagccaccttccttcttcaccccatgcttctcaccaaatttttgttgncattgagggcacttggataactcaagttgatatttatagctgatcaatctatatgtgtcacagaactatgctgcctaaagtgatcttggctccttaatggtccttttggccccttggatagttaacagctgagtaattctaatctcttctg

SEQ ID NO: 300 - DNA, 269 bp, Homo sapien
  misc_feature (1)...(269): n = A,T,C or G
acagcaaagcgacccttggtgtcatagatcagacggaaattctctcccgtcttgtcaatgctgatgacatccatgaatccagcagggtaggttatatcagttcggaccttgccatcgattttaatgaaccgctgcatgcaaatcttctttacttcatctcctgtcagggcatacttaagtctgttcctcaggaaaatgatgaggggganacactntctcancttgnggggaccgnctngatngacnaggagcaaacacaccggtcaatt

SEQ ID NO: 301 - DNA, 234 bp, Homo sapien
accaacaacaatatgtggtgcttcagcctgcagtttttgcatttcatttcgaacatttgttccaccaatgcaggcatgacaagtggctcccatatagtctccaagtgccagaattaccttttggatctgttgagccagttctctggtgggggccaatactagtgcttgggtctccttgaactcaatctccaactgttgcaggatggaaatagcaaatgtggctgtcttgccagt

SEQ ID NO: 302 - DNA, 496 bp, Homo sapien
accctcttcaagaatcggatggatgtcgttttgaagggcgacaatcttcctcagtatagaggggtgaacattcggagattgctcaacggtagcatcgtggtcaagaacgatgtcatcctggaggcagactacactttagagtatgaggaactgtttgaaaacctggcagagattgtaaaggccaagattatgaatgaaactagaacaactcttcttgatcctgattcctgcagaaaggccatactgtgctatagtgaagaggacactttcgtggattcatcggtgactccgggctttgacttccaggagcaatgcacccagaaggctgccgaaggatatacccagttctactatgtggatgtcttggatgggaagctggcctgtgtgaacaagtgcaccaaaggaacgaagtcgcaaatgaactgtaacctgggcacatgtcagctgcaacgcagtggcccccgctgcctgtgcccaaatacgaacacacactggt

SEQ ID NO: 303 - DNA, 453 bp, Homo sapien
acccccagagacctcatagttgtccataagtgttttggaaggagcaggactcagccggaaggcattattaagtatccccagacctaatttctgcgccagagtagcccagtttttgtctggatcaggaatttctagtaacttatacagctgcagcttcacatcttcagccagctgtttcatgtctccttgtgctagtaaatcatcagatgtaaactctggctcatatggtttcccatttaatatgtcaaatacctgccagctggtggccatatctagaggcgtggttccaggcacaactccttcatcctctcctgcattttcccaagagtcatccaggtcatagagaggctcaaagttctccaccaggggatctgctcctgctgctttgagaagagctgccagcctggtggaccctctcccagctgctatatgcaggggtgtggttccatcgta

SEQ ID NO: 304 - DNA, 510 bp, Homo sapien
acagtggttttcttttctttggtcggggagagtgggctggaatggagagtgaggcccacaaattacctgcagagacgtggaggcgtgagggagaacatgcttgttaaatatgcaggtagattaggagacaccaaacagagattcagacacagtaaggctgggatgagatcctcgaagctgtgttttaacaaactccactggagagtcccatattccctcaaatttgggaatcacgaccctgaaccaggttgggcctgaagcagtcaactgaattcactttttcggatagtaatttgttcccaggggcagtgacaaccatgatgttccaggtttggtctggcactctgccttgaacgtaggaagctcttgatgatttgtggaatgaatttttaaaaaattactatctggggaaaactagttggcatacagagttgtaggacagggtttatgtgattcatttgatattttagtattttgggtgtaaaagccaacaggcaaactttgccaggt

SEQ ID NO: 305 - DNA, 574 bp, Homo sapien
  misc_feature (1)...(574): n = A,T,C or G
accttttattcatgtgggaaatcaagtagtatcagaacttggtccaatagtccaatttgttaaagccaagggccattctcttagtgatgggctggaggaagtccaaaaagcagaaatgaaagcttacatggaattagtcaacaatatgctgttgactgcagagctgtatcttcagtggtgtgatgaagctacagtaggggaggcctactgaacttgacgcactggtatttggccatctatacaccattcttaccacacaattgacaaatgatgaactttctgagaaggtgaaaaactatagcaacctccttgctttctgtaggagaattgaacagcactattttgaagatcgtggtaaaggcaggctgtcatagagttatgtgttagtctcaggagtcttaacttttgaaatatgttttacttgaatgttacattagagattggtgtcagaattttaaaaccaaattactgctttttgaaacctcaaattatataatgtatcttatgtatgtgctttatattggtatttgngtatacattaaaataattcngaattatttaatctgatatgttg

SEQ ID NO: 306 - DNA, 540 bp, Homo sapien
acatacttaaggcccagtggaattgtggaccacaaggctggaatgtggtgcggggaaaaatcacggtcataatgaaatgctagctcaagggctctgaactccaccatcaggcaatggtgagccactgtaggttttctgagatgggccatagtcagagctatgcttcgggaagatcacgatggcaataatgcatcacaaggatggagggggtgagaatagcttaaaggtaggaaaagcagttagaaggtcactggtaatagcagttgaggcttaattagtcagaatggaaaagaggatatggacatgagagatatcttagaggtgagaatgacagaactcggcaatcaccgcatttcataatgcatcaagtaggctgaccatatatcctggtttgcctgggatatgttttcctgatgtaattactaatggcacccttttactctcgaaaaggtttggacaataaactatataatcatattaattaggagcaattagtgaacagaatcaaaggtgactccaagattttaaacctggattagt

SEQ ID NO: 307 - DNA, 541 bp, Homo sapien
acacaatggtttattaaaggaatgtatggcccacatcaacctagcaaggattctactggtaaaccttcccatggccaaaggaaaaacaagcaggagttgagtggctggggtggggtgcaggcaatggagagagggcagaagggtgtagaagctgaagggggctagaagcttactcctgagtttcttccttctgtcttcaaatctttacttcttatggccaaagacccagctgtttcataggctggagatgcactcttctagactgctcaagacagccagagacaggggaggagggaagaaggatactgtggaaagggatggcggggcaaacatttagagctagaagccactactgggccaatgctaaagtttctgtctctaagcctaaaaaagccagtgtagtagggcccttatcactcttagtttgctaggtttcccctctgaaataatgagcagatttagccaggctagcagaaaggaagaggacggggctgtgcaggagttagcagaatcttgattcttgctctatggtcggtacctc

SEQ ID NO: 308 - DNA, 566 bp, Homo sapien
  misc_feature (1)...(566): n = A,T,C or G
acaacacagtgtcagggagtaggtgatttcttttccctatagttcatggtagtgatacctaaatgggtggcacaaaatgagttctggcttgttagactgatgcttctctttgctgcaggttttgaacaaactgtctggcttacaggggtgagggagagcacctgacaatgggtggtgatgtgcgtggagctcctaccctgaacatggcttcatgagatgtcctgtggtgggtcaatgctttatctcattccatggagccttcaagatgacaagaaaacatcaagagataggagcttgagataacaacattaaataacagaacatgtaacagggtaaaacactgagaagaaatgaaccaattcattgtttcctcccaagagagactgtgacactagttttaaaaagcggcaaagtcctttctctacatacatgcttggagatacccccaaacttagagattatgaagtaggccaggaaattcacttattgcacgatgcttggcagggnaacaaatgacgctgattttttcttttttaactgaactctctcaagaaaatgttttatga

SEQ ID NO: 309 - DNA, 319 bp, Homo sapien
  misc_feature (1)...(319): n = A,T,C or G
accttcactatatnttactttattgntaatnaactgcatttttaaaagtagagattggtcttctcttatgtatacttatatccctctaaatttaaatccatcttgccatgttttgtatttaacttgaagtgatctaattaatgagaaaaagaggtattttaaaattaaggtgcatccaaaagggaagcgtaaggatacagagagatctggaaaccttgccttgagagacgtaatcgaaagaacctaggacacgtgccctgaaaatgagacaaggaagacatgtgagaaccatctgcatgtttgcaaagtctgtcgctgg

SEQ ID NO: 310 - DNA, 418 bp, Homo sapien
acttgtttcaccatacttcattcagaccagtgaaagagtagtgcatttaattggagtatctaaagccagtggcagtgtatgctcatacttggacagttagggaagggtttgccaagttttaagagaagatgtgatttattttgaaatttgtttctgttttgtttttaaatcaaactgtaaaacttaaaactgaaaaattttattggtaggatttatatctaagtttggttagccttagtttctcagacttgttgtctattatctgtaggtggaagaaatttaggaagcgaaatattacagtagtgcattggtgggtctcaatccttaacatatttgcacaattttatagcacaaactttaaattcaagctgctttggacaactgacaatatgattttaaatttgaagatgggatgtgt

SEQ ID NO: 311 - DNA, 275 bp, Homo sapien
  misc_feature (1)...(275): n = A,T,C or G
ctggcagctctgaaccctgagtccaacacagctgggctggacatatttgccaaattttctgcctacatcaagaattcaaacccagcactcaatgacaatctggagaagggactcctgaaagccctgaaggttttagacaattacttaacatcccccctcccagaagaagtggatgaaaccagtgctgaagatgaaggtgtctctcanaggaagtttttggatggcaacgagctcaccctggctgactgcaacctgttgccaaagttacacatagt

SEQ ID NO: 312 - DNA, 83 bp, Homo sapien
  misc_feature (1)...(83): n = A,T,C or G
acgcttctgnccncagccctanntccttcggcttcacatcaatgatgaccaatacggaattaggacagtatcttttcatgagt

SEQ ID NO: 313 - DNA, 413 bp, Homo sapien
  misc_feature (1)...(413): n = A,T,C or G
cacaagctcaggcatcgttgaagcatctacacgcgtccacagcagtactggctcaccacgcacaacactgtcccctgccagctccacaagccctggacttcagggagaatctaccgccttccagacccacccagcctcaactcacacgacgccttcacctcctagcaccgnnacagcccctgttgaagaatctacaacctaccaccgcagcccaggctcgactccaacaacacacttccctgcacagctccacaacttcgggccacagtgagaaatcaacaatattccacagcagcccagatgcaagtggaacaacaccctcatctgcccactccacaacctcaggtcgtggagaatctacaacctcacgcatcagtccaggctcaactgaaataacaacgttacctggcagt

SEQ ID NO: 314 - DNA, 357 bp, Homo sapien
acacaatggtttattaaaggaatgtatggcccacatcaacctagcaaggattctactggtaaaccttcctatggccaaaggaaaaacaagcaggagttgagtggctggggtggggtgcaggcaatggagagagggcagaagggtgtagaagctgaaggggtctagaagcttactcctgagtttcttccttctgtcttcaaatctttacttcttatggccaaagacccagctgtttcataggctggagatgcactcttctagactgctcgagacagccagagacaggggaggagggaagaaggatactgtggaaagggatggcggggcaaacatttagagctagaagccactactggg

SEQ ID NO: 315 - DNA, 419 bp, Homo sapien
accaggaagaaacatattgccgagtggatgccgccgcgcagcgtgtttgcttgaggcagaagcttcagcatctgctgggataactggaggaagaaatatgaagccttagcggctttacccgggaagcgagtttcgagatggcggctcagcggatccgagcggccaactccaatggcctccctcgctgcaagtcagaggggaccctgattgacctgagcgaagggttttcagagacgagctttaatgacatcaaagtgccttctcccagtgccttgctcgtagacaaccccacacctttcggaaatgcaaaggaagtgattgcgatcaaggactattgccccaccaacttcaccacactgaagttctccaagggcgaccatctctacgtcttggacacatctggcggtgagtggtggtac

SEQ ID NO: 316 - DNA, 99 bp, Homo sapien
tctagtccagaatacaccaaaaaaatagaaaacctatgtgctatgggctttgataggaatgcagtaatagtggccttgtcttcaaaatcatgggatgta

SEQ ID NO: 317 - DNA, 473 bp, Homo sapien
acttatttcaacaattcttagagatgctagctagtgttgaagctaaaaatagctttatttatgctgaattgtgatttttttatgccaaattttttttagttctaatcattgatgatagcttggaaataaataattatgccatggcatttgacagttcattattcctataagaattaaattgagtttagagagaatggtggtgttgagctgattattaacagttactgaaatcaaatatttatttgttacattattccatttgtattttaggtttccttttacattctttttatatgcattctgacattacatattttttaagactatggaaataatttaaagatttaagctctggtggatgattatctgctaagtaagtctgaaaatgtaatattttgataatactgtaatatacctgtcacacaaatgcttttctaatgttttaaccttgagtattgcagttgctgctttgt

SEQ ID NO: 318 - DNA, 505 bp, Homo sapien
tttttttgaaaaagtcatggaggccatggggttggcttgaaaccagctttggggggttcgattccttccttttttgtctagattttatgtatacgggttcttcgaatgtgtggtagggtggggggcatccatatagtcactccaggtttatggagggttcttctactattaggacttttcgcttcgaagcgaaggcttctcaaatcatgaaaattattaatattactgctgttagagaaatgaatgagcctacagatgataggatatttcatgtggtgtatgcatcggggtagtccgagtaacgtcggggcattccggataggccgagaaagtgttgtgggaagaaagttagatttacgccgatgaatatgatagcgaaatggattttggcgtaggtttggtctagggtgtagcctgagaataggggaaatcagtgaatgaagcctcctatgatggcaaatacagctcctattgataggacatagtggaagtgagctacaacgta

SEQ ID NO: 319 - DNA, 547 bp, Homo sapien
  misc_feature (1)...(547): n = A,T,C or G
ttttttttttttttggaggaaaacccggtaatgatgtcggggttgagggataggaggagaatgggggataggtgtatgaacatgagggtgttttctcgtgtgaatgagggttttatgttgttaatgtggtgggtgagtgagcctcattgtgttgtggtaaatatgtagagggagtatagggctgtgactagtatgttgagtcctgtaagtaggagagtgatatttgatcagganaatgtggttactagcacagagagttctcccagtaggttaatagtggggggtaaggcgaggttagcgaggcttgctanaagtcatcaaaaagctattagtgggagtagagtttgaagtccttgagagaggattatgatgcgactgtgagtgcgttcgtagtttgagtttgctaggcagaatagtaatgaggatgtaagtccgtgggcgattatgagaatgactgcgccggtgaagcttcagggggtttggatganaatggctgttactacgagggccatgtggctgattgaagagtatgcaatgagcgatttta

SEQ ID NO: 320 - DNA, 372 bp, Homo sapien
acggccagggctattggttgaatgagtaggctgatggtttcgataataactagtatggggataaggggtgtaggtgtgccttgtggtaagaagtgggctagggcatttttaatcttagagcgaaagcctataatcactgcgcccgctcataaggggatggccatggctaggtttatagatagttgggtggttggtgtaaatgagtgaggcaggagtccgaggaggttagttgtggcaataaaaatgattaaggatactagtataagagatcaggttcgtcctttagtgttgtgtatggctatcatttgttttgaggttagtttgattagtcattgttgggtggtaattagtcggttgttgatgagatatttg

SEQ ID NO: 321 - DNA, 229 bp, Homo sapien
gccgtggcaccggcatcggctgacactgctgcctccagctagttatttcgtcctcttccgttcttcacccctacaccttggaggtgaacttctcacctgagggctgtaaagactcgtttgaaaatggagagccaagaaccaacggaatcttctcagaatggcaaacagtatatcatttcagaggagttaatttcagaaggaaaatgggtcaagcttgaaaaaacaacgt

SEQ ID NO: 322 - DNA, 295 bp, Homo sapien
accattggtggccaattgatttgatggtaagggagggatcgttgacctcgtctgttatgtaaaggatgcgtagggatgggagggcgatgaggactaggatgatggcgggcaggatagttcagacggtttctatttcctgagcgtctgagatgttagtattagttagttttgttgtgagtgttaggaaaagggcgtactactcgattgtcaacgtcaaggagtcgcaggtcgcctggttctaggaataatgggggaagtatgtaggagttgaagattagtccgccgtagtcggtgt

SEQ ID NO: 323 - DNA, 560 bp, Homo sapien
accttgatcaggctgtgcatcacagtaattccgttctaggtaggcagagttgatctttgtctcatctgccaggctgcgggctcttcaagggcagggaccttgtcatagtcatttttattttcacagtgcttggaacatggtggaaaatgaatgttggaattattggagtaatataatttgtatcaaatgtccttttgaattaagagatttagttatgtttactaagaatgtaaactttgaattggtttgcattttaacaattaggatggtttattgatgtgaattttgaaatgtagaggtataatgttaaattattttatactttatggaaatcaagtgaaatgtttgaaaaaatgccgccattatcctctggtattttctactctctggaattatgtgctgtaaatgatcggctgtaaatgtgaggcacaccacccacccctgtgtggaaagtgttgtggcgcttcctgccacccacccacctctctaccgtcgctccttgtgacacttgtctgtcgtctcccatccaaactccaagcttacagctacctcagtacctc

SEQ ID NO: 324 - DNA, 602 bp, Homo sapien
acaaatgatgaccaataattttatctttcttcctttgaatatactgtaaattctatgaaaaattcatttataaaaacaaagcaaagaatagcataaattttattttctttcgcaatgttatattttaatagaagaaaaaaactacctttctgataactgtaacctaagtaaaacaaatattttacatataatttgaggcaaagtaatgagtttcttgaatcaactggagaaattagtcacattacctatgtcatgcataaatgatggtaagaagaaaaaaaaagcatctgatcatgtatgagaactgtctccgttcaaattatgagaaataaaatgaaaattgctaaagggagaaaatgaataaaatatgatttaaaaaaaaccatatgggaattgcatagatgagaaaaaaattttcattctagggatctaaaagtaatgtttttagctttaaaaacatacacacacatatataattgagacatgtctatcatcttggctaaaattttaatatatgtctccccaaaagcattttaaatatgaaagccaagattcttaagctcttgatgatataccagaagggtatactttattattttttt

SEQ ID NO: 325 - DNA, 322 bp, Homo sapien
  misc_feature (1)...(322): n = A,T,C or G
acgatgtctagnnatgagtttgctaatacaatgccagtcaggccacctacggtgaaaagaaagatgaatcctagggctcagagcactgcagcagatcatttcatattgcttccgtggagtgtggcgagtcagctaaatactttgacgccggtggggatagcgatgattatggtagcggaggtgaaatatgctcgtgtgtctacgtctattcctactgtaaatatatggtgtgctcacacgataaaccctaggaagccaattgatatcatagctcagaccatacctatgtatccaaatggttctttttttccggagtagtaag

SEQ ID NO: 326 - DNA, 87 bp, Homo sapien
acaattaagctattattgactatactcacccggttgtgctatcaaatactaggtcttatttatactttctaactacatagtttttgt

SEQ ID NO: 327 - DNA, 269 bp, Homo sapien
accccctccccatctgcacaccctgtgttcaaaccagtcccagctcctgtcatgttattggcttctgagtatctgtattaatagttgttcctgccagcatatgaagatgaacaaatacacaactgagagagatccagggattttaatccacagatgccagagcttgctgggatgtagtcagaaatcaagctgaactcaggagttcacagtctttcctgtaatgatggttgggaggtgagggaagtcagaggccttttctaggatctttc

SEQ ID NO: 328 - DNA, 259 bp, Homo sapien
acgtgggtgaggggatggaggaaggcgagttttcagaggcccgtgaagatatggctgcccttgagaaggattatgaggaggttggtgtggattctgttgaaggagagggtgaggaagaaggagaggaatactaattatccattccttttggccctgcagcatgtcatgctcccagaatttcagcttcagcttaactgacagatgttaaagctttctggttagattgttttcacttggtgatcatgtcttttccatgtgt

SEQ ID NO: 329 - DNA, 482 bp, Homo sapien
ggaaaagattgatcgccgttctggtaaaaagctggaagatggccctaaattcttgaagtctggtgatgctgccattgttgatatggttcctggcaagcccatgtgtgttgagagcttctcagactatccacctttgggtcgctttgctgttcgtgatatgagacagacagttgcggtgggtgtcatcaaagcagtggacaagaaggctgctggagctggcaaggtcaccaagtctgcccagaaagctcagaaggctaaatgaatattatccctaatacctgccaccccactcttaatcagtggtggaagaacggtctcagaactgtttgtttcaattggccatttaagtttagtagtaaaagactggttaatgataacaatgcatcgtaaaaccttcagaaggaaaggagaatgttttgtggaccactttggttttcttttttgcgtgtggcagttttaagttattagtttttaaaatcagt

SEQ ID NO: 330 - DNA, 579 bp, Homo sapien
acctgataaaactttaaccagggaagcattaaacacagtgcagcagcttttgcccaggcttctaagttcctgccggcagcatttatcaatgtaagaactaggatgcttcctgcagtggcactaccttcccctagagctggagcatgctgcttggccttaagccccagcatgatgaggcttccctcctgccaggtcagtaaaagttagagagctcagaattgggtcttgcctgggtgcaggtggcagggtttgctgaaacccctaaagagaagtcaccaagggaggcaggtaatgaatgtttccagaatcagtcggatactcatagcaatttctggctatctttcaaatgttgaatttctggatgctgagagggactttgatttgatatcattaaatccaggacagtcccaagaagtgcttggagtctcggctctgacagcccaagaagggaaataacttgtattaaggaacaactatgagccaggccctgagctgtctcttagataataaaacagatggggagtggaagagtcatttgcttcaagttatacagctaggaaatactcaagccaaatcttg

SEQ ID NO: 331 - DNA, 501 bp, Homo sapien
acctgtgggtttattacctatgggtttatatcctcaaatacgacattctagtcaaagtcttggtaatataaccaatgttttcaaatgtattctgttatacaaagagcagatttttattgaacttgtgcaataactatattaccatacaatataaatattcatgaatagtttcccaagtctggagcgaccacatagggagaaaatgtaaatgtctcaatttttgttcacaaaagtatattttatcaaattgctgtaagctgtggatagcttaaaagaaaaaaagtttcctgaaatctgggaaacaagacatttaaagaatcagcaaaatttcaaataaaaaattatgaaaatattatcctcattagttcatttagtcccatgaaattaattattttctctgcttgatcttggtggacagtttcatgaagctgtcagttagttcattaaagttttggaaattctcagacagtgcagtggtatcagaaacttgtattcaagagt

SEQ ID NO: 332 - DNA, 503 bp, Homo sapien
acctgtgggtttattacctatgggtttatatcctcaaatacgacattctagtcaaagtcttggtaatataaccaatgttttcaaatgtattctgttatacaaagagcagatttttattgaacttgtgcaataactatattaccatacaatataaatattcatgaatagtttcccaagtctggagcgaccacatagggagaaaatgtaaatgtctcaatttttgttcacaaaagtatattttatcaaattgctgtaagctgtggatagcttaaaagaaaaaaaagtttcctgaaatctgggaaacaagacatttaaagaatcagcaaaatttcaaataaaaaattatgaaaatattatcctcattagttcatttagtcccatgaaattaattattttctctgcttgatcttggtggacagtttcatgaagctgtcagttagttcattaaagttttgggaaattctcagacagtgcagtggtatcagaaacttgtattcaagagt

SEQ ID NO: 333 - DNA, 195 bp, Homo sapien; identical to SEQ ID NO: 8

SEQ ID NO: 334 - DNA, 390 bp, Homo sapien
actgcgactgtgggctgcggtcattcacgagacaggctcgtgttgttgggggcacggatgcggatgagggcgagtggccctggcaggtaagcctgcatgctctgggccagggccacatctgcggtgcttccctcatctctcccaactggctggtctctgccgcacactgctacatcgatgacagaggattcaggtaccattggtggccaattgatttgatggtaagggagggatcgttgacctcgtctgttatgtaaaggatgcgtagggatgggagggcgatgaggactaggatgatggcgggcaggatagttcagacggtttctatttcctgagcgtctgagatgttagtattagttagttttgttgtgagtgttaggaaaagggcgt

SEQ ID NO: 335 - DNA, 60 bp, Homo sapien
  misc_feature (1)...(60): n = A,T,C or G
gtacaagctnttntttttttttttttttttttttatttttttttttttttttggttaaaa

SEQ ID NO: 336 - DNA, 649 bp, Homo sapien
  misc_feature (1)...(649): n = A,T,C or G
actggtcgaaaacggccatcaaagaagaaaagtccaatgtatggattaacatgtaaaaatgtggcaacatcgaggtagttaggtaaagttgcagacagtccaagaatccttatcatactctgtgtggattccacctgccgtaaagtaccaccatttgaaaaaaaaaaaaaatcagtggatttccataacacagaaaatgcatggacatgcatctacagtagagttaaaaatttcctgtgactaaaaaattaaaaactgaatcaccagtagcaaatgtatagtcaatggctatgacaagaacagatcctgccgagctcataaatgcaattattgtcttttttgctttataaaaaagacattacatattttattgcattattctcctaataaaaacatactaccacgtagctctccccatccccattctttgcttccagatttttatagaaaataactgttttagtctggccttggaaagtgaacccaccagcaccaccttcacctactcactcttcaattcaatatgcacatagcaaaagccaacacttcaaatctcttgcccacatcaaaaaaagtagtttcaggagaaaaaacattaataccagttgataaaaataanggcataaaagctntgagagagatagctctg

SEQ ID NO: 337 - DNA, 411 bp, Homo sapien
acggccagggctattggttgaatgagtaggctgatggtttcgataataactagtatggggataaggggtgtaggtgtgccttgtggtaagaagtgggctagggcatttttaatcttagagcgaaagcctataatcactgcgcccgctcataaggggatggccatggctaggtttatagatagttgggtggttggtgtaaatgagtgaggcaggagtccgaggaggttagttgtggcaataaaaatgattaaggatactagtataagagatcaggttcgtcctttagtgttgtgtatggctatcatttgttttgaggttagtttgattagtcattgttgggtggtaattagtcggttgttgatgagatatttggaggtggggatcaatagagggggaaatagaatgatcagt

SEQ ID NO: 338 - DNA, 278 bp, Homo sapien
  misc_feature (1)...(278): n = A,T,C or G
tttttttgctctanagggggtgctatagggtaaatacgggccctatttcaaagatttttaggggaattaattctaggacgatgggcatgaaactgtggtttgctccacagatttcagagcattgaccgtagtatacccccggtcgtgtagcggtgaaagtggtttggtttagacgtccgggaattgcatctgtttttaagcctaatgtggggacagctcatgagtgcaagacgtcttgtgatgtaattattatacgaatgggggcttcaatcgggagt

SEQ ID NO: 339 - DNA, 446 bp, Homo sapien
acttaaactccagaaagaaaaagctaggaaacagaagtagagaggaatggaaaaaaacaaaaaaacccaatacctctgccatcttgccccatcataacccaaatagcatcaaagtggcagagatgggactaaagttaaagcaagcatcaaagttattacttttagggtaatgggatgaatttgaagagcactatgtcaaccaaatactaaacttcatggaataactgtgtttgtgtttctgtggaggagttgcggttttgtttgttttaatttggcccacgctgccccaatggaggaaattttaagataatcattaataaggcaacagcttccaggattaaaatacctataccatctatacggagttacaatgaggacaagacccacatagaccacaaaggaaaccgggaccagaagcttccagtgcattttcacagatcgttggt

SEQ ID NO: 340 - DNA, 323 bp, Homo sapien
accttcataaggtggtatggggggttggggtcaggccctgaacatcgtcctacttgagaatctgtcaggggaaaaagtcaaggggagcaggaggaagagccaggagggccagaggcagagaagagatggagtcttaggggccagggtgagcgaggggtccagggcctagaggtgcttcctgggggcgggggaatgcagccagtgtccccctcccctcttccaccccagctccagccctggtcttgtcttttcatccctcttccccacgacagaagaagttgtggccctggccatgtcatcgtgttcctgtgtcccctccatgt

SEQ ID NO: 341 - DNA, 501 bp, Homo sapien
acctgtgggtttattacctatgggtttatatcctcaaatacgacattctagtcaaagtcttggtaatataaccaatgttttcaaatgtattctgtcatacaaagagcagatttttattgaacttgtgcaataactatattaccatacaatataaatattcatgaatagtttcccaagtctggagcgaccacatagggagaaaatgtaaatgtctcaatttttgttcacaaaagtatattttatcaaattgctgtaagctgtggatagcttaaaagaaaaaaagtttcctgaaatctgggaaacaagacatttaaagaatcagcaaaatttcaaataaaaaattatgaaaatattatcctcattagttcatttagtcccatgaaattaattattttctctgcttgatcttggtggacagtttcatgaagctgtcagttagttcattaaagttttggaaattctcagacagtgcagtggtatcagaaacttgtattcaagagt

SEQ ID NO: 342 - DNA, 338 bp, Homo sapien
aggtactaaagggagaaagaaaaggaagagatcaccctcagtgcttctttgctgctccttttctttagacatttaaccccttttagttcagaaaatgtaaactagcactagcatggtcttttaaggattttgttcatatcagtcatatatctgttattattatgtatttaaagattgtgtttattcccacgatttggagaagcctagccaaaaaaaaaaaaaaaaaagattgtgtttatattattgctagaagatatgtgttgatgggaccaaaaaaagactggttaataaataaaaattttttctacactaattatatataaaccatattcacatgt

SEQ ID NO: 343 - DNA, 529 bp, Homo sapien
gtgaatttgtccgtctccgacttctggagatttatttttttagatgaggtgttgctgtgttgcccaagctggacttgaacccctaggctcaagcaatccttccacctcagtctcccaagtagcagggactacagagtgatgatgcgggtgcgctggttggtgagacaggacagccggcaccagcgaatcagacttccacatttggaagcagttgtgattgggcgtggcccagagaccaagatcactgataagaaatgttctcgacagcaagttgaaagcagagtgtaacaagggatatgtcaaggtaaagcagagtttgaggaagaggcaaagaaccctggcctggaaacacacgggaagagaaagagatcaggcaacagtgattctatagaaagggatgctgctcaggaagctgaggctgggacagggctggaacctgggagcaactctggccaatgctctgtgcccctaaagaagggaaaagatgcacctatcaaaaaggaatccctgggccactggagtcaaggct

SEQ ID NO: 344 - DNA, 340 bp, Homo sapien
  misc_feature (1)...(340): n = A,T,C or G
actgagattnnccatggcattcataactgtcttcctaaaaacaaagcaatggctcaccaacgagccagccttcatgcttacatgtgacactgtaagtggaagtttagaaggatgtcctgacattaaaaagtagcctatcatcagattccagagctgaacagctgtgtttttctgtcagattttgattgttttggccttgcttgggaaaacctgcaggagtattgtatttttggcattgtagagcatttgagtagttggttcctttaaaaaggctttgaatactgtcctaaaaactcatccctaccactcacaagaaccaaagttttacctggctaatagt

SEQ ID NO: 345 - DNA, 291 bp, Homo sapien
  misc_feature (1)...(291): n = A,T,C or G
ttttttttttttttttttttgctctanagggggtgctatagggtaaatacgggccctatttcaaagatttttaggggaattaattctaggacgatgggcatgaaactgtggtttgctccacagatttcanagcattgaccgtagtatacccccggtcgtgtagcggngaaagtggtttggtttanacgtccgggaattgcatctgtttttaagcctaatgtggggacagctcatgagtgcaagacgtcttgtgatgtaattattatacgaatgggggcttcaatcgggagt

SEQ ID NO: 346 - DNA, 411 bp, Homo sapien
acggccagggctattggttgaatgagtaggctgatggtttcgataataactagtatggggataaggggtgtaggtgtgccttgtggtaagaagtgggctagggcatttttaatcttagagcgaaagcctataatcactgcgcccgctcataaggggatggccatggctaggtttatagatagttgggtggttgatgtaaatgagtgaggcaggagtccgaggaggttagttgtggcaataaaaatgattaaggatactagtataagagatcaggttcgtcctttagtgttgtgtatggttatcatttgttttgaggttagtttgattagtcattgttgggtggtgattagtcggttgttgatgagatatttggaggtggggatcaatagagggggaaatagaatgatcagt

SEQ ID NO: 347 - DNA, 375 bp, Homo sapien
acctaatcttcaagcttaaaatttaagttaaaattaatctctattttgtgggcaccctttagtgaactaaaatctacatgaaaccttttggcttttgtgtagcaggaaatacccacgttttgggtcaattagtgcagatgggagcagcagaggagctacaccagacagcaaagcaagactagagcaaacgagaaggaccagcccctagcccctctgtgctcccgggaggacctgggctgttttcacctaattacacccaactttgcttaaaagtcgtataatcagacactattctcagcacaagtttgataaatatacaaaaaccaggttcaatttcatcgtgagtttctttccattctgatccttgtatccaat

SEQ ID NO: 348 - DNA, 378 bp, Homo sapien
gaagaaggcaggggcccttagagtcttggttgccaaacagatttgcagatcaaggagaacccaggagtttcaaagaagcgctagtaaggtctctgagatccttgcactagctacatcctcagggtaggaggaagatggcttccagaagcatgcggctgctcctattgctgagctgcctggccaaaacaggagtcctgggtgatatcatcatgagacccagctgtgctcctggatggttttaccacaagtccaattgctatggttacttcaggaagctgaggaactggtctgatgccgagctcgagtgtcagtcttacggaaacggagcccacctggcatctatcctgagtttaaaggaagccagcaccatagcagagt

SEQ ID NO: 349 - DNA, 429 bp, Homo sapien
accaaaccactccaccaagagccagaacaacgagcagaagggtgacactaatggcaaccaaaacagaggccagcatctcaacattctttatggggatctgcatgcccagcatcttcacattgccttcttcaatgtctctggggggcactgctttttcagtctctttggtgatgacggtgagagggcttaagtgttctgttcgagaaaaaacagtgaagagggtctccatgccagcatggacatggtcagtcacatggcagtgcatcagccatgtcccagggttgctggccaccatctccacaacctcaaaagtccctgggaacagatccaccacatctgcccggtagttctcgccattccgatagaggaagctctctgcatgaaagtggatggtgtgtagatccacatcttggcccatggccagcatgt

SEQ ID NO: 350 - DNA, 339 bp, Homo sapien
actgccaggggacagtgttgtgtctgtggagcctgggctgctgtgggaagctgtagattcctgactgacgcctggcatggtggtgctggcaggtaacagtgttgtatccgttgagcctgggctgctgctgtagacggtggtagattcctcactgaggcctggcgtggtggtgctggcaggtgacactgttgagtgagtagaacctggttggctacgggaggtggtggattcttcaccgacgcctaggcttgtcatactggcaggtgagagtgttgtggttggtgatctggggctgctgtagaaggtggtagatgcctcactgaggcctggtgttgtggt

SEQ ID NO: 351 - DNA, 594 bp, Homo sapien
actagacgagtattgcgcccgaaatggagtccgggggtgtcaccgacatctctgctacctcagagacttgcttgaacgggcagaaaatggcgccatgatcgaccccacccttcttcactacagctttgccttctgtgcatcccatgtccatgggaacaggcctgatggaattggaactgtgactgttgaagaaaaggaacgttttgaagaaatcaaagagaggctccgagttctgctagaaaatcagattacacattttaggtattgctttccatttggtcgacctgaaggtgctttgaaagctactctctcactcttggaaagggttttgatgaaagatattgttaccccagtgccacaagaggaggtaaaaacagttatccgtaaatgtctggaacaggctgcgttagtcaactattctcggctctcagagtatgccaaaatcgaagaaaatgtaggccggttaatcactcctgccaaaaagcttgaagatacaatacgtcttgctgaactagtcattgaagttcttcagcaaaatgaggagcaccacgcagaggcctttgcgtggtggtcagatttaatggtggagcatgc

SEQ ID NO: 352 - DNA, 590 bp, Homo sapien
acatcagaactcatgccaacagtctttatgatgggattaaggtggacaagatctcctaagatctgtgaatgggattaaggtggacaagatctcctaagatctgaaaagaaaccttaatacgctcatatggttggagtgttaagtgaacctctgattttgtcagggtttttctacgtgtaggcgtgaatagggggcaccccttcaaaactgtacattaaaaatatgttatatacgtaaatgctaagggcatcagttttgtatttttttttatttaacattttcatttcattggaaatttgaggtaattttgctaagtcttaaaggctaattcactacagttcttcccatttaagtttattacaaaaggaaatttagaataatttgaactctttattggataattgagatattgataactaacctcctataggaagtttgtatttttaaaatttatgaaataaagagaaatatttaaatacttgcgaagccatagctttaagtaattaggatgtttttactttgacacctattcttagtaatgtaacaacaaatattttaagttagcaactaatacaggtacgtacagcatt

SEQ ID NO: 353 - DNA, 196 bp, Homo sapien
acatatttttacagtaaaatgctttatggaactagttttagagccctctatggctttaaggccttgcttactgcctgcaaattttgagaaatttaaaaataagcattctaacacttttattcccacagaaaaattccaagtcaaattatcaaatcaaacacaaaaataagtcttacctcttgtataagcatgttgt

SEQ ID NO: 354 - DNA, 143 bp, Homo sapien
acctttgtgcagtagaagctagtgagcatgtgagcaagcggtgtgcacacggagactcattactatctgccaagagtagaaagaaaggctggggatatttgggttggcttggttttgattttttgcttgtttgtttgttttgt

SEQ ID NO: 355 - DNA, 447 bp, Homo sapien
acattcattggaacaacatagccaatttattaatctattctagaatattaatagctttcatacattctccacaaacagaccaatcactgccacacaattcatctttagaaagtttttaagcatcatgatttgtagcttactgtcattgaaaacaaaacaaataattctttatttataccaaacaaatctttgatgggcacttagtttcctttatggcaatactagatttctagttatcaaaaatattaaagtaattataaagtttaaaaccctgcaacatttacagaaaccaacagtattaccactttcacttttaagctaaattagataatgtttgcatgaaatagctttcattttttcctacctggagatgtcttgtttttaaattattaaattgtcaaactaaaaatactcctcccttttcagaagctagtgaatagagagggt

SEQ ID NO: 356 - DNA, 195 bp, Homo sapien; identical to SEQ ID NO: 8

SEQ ID NO: 357 - DNA, 106 bp, Homo sapien
acaggactaggaagcagataaggaaaatgattatgagggcgtgatcatgaaaggtgataagctcttctatgataggggaagtagcgtcttgtagacctacttgcgc

SEQ ID NO: 358 - DNA, 165 bp, Homo sapien
cgactttccaacatttttgttattggcaagggcaacaaaccatggatttctcttccccgaggaaagggtatccgcctcaccattgctgaagagagagacaaaagactggcggccaaacagagcagtgggtgaaatgggtccctgggtgacatgtcagatctttgt

SEQ ID NO: 359 - DNA, 557 bp, Homo sapien
  misc_feature (1)...(557): n = A,T,C or G
acaatacagtgttcaatagtttttattgcagtgatgtttttccaataatttaagtaattctcttcctagtataatacagttttcataaataatgtttacttgctttctttatattttcaaataaaattaaaatgctcgagcacttcctttcagaaagttataaaattaaaaataattattttaaatgctcattcaaatgtgtctgtatacttgctatgcccctttttctataattccaaactgagactgatttttcagagatttttaactttaataattttaaatctagaatcaagtgaaacagatatgttaaatactgagtctagttttcttccatcttatggagcttcatggaataagaaactaatctagtgcaaatgaagattaaatatttctgggtgatggagagatagtcaacaaatttatttatccatcctctgcacatcagtccactggagcaggagttctacacattaaaaatgtaatgggatcagcctagcattgnttggngntcttttgttgnattttttttagaatgggggtgggggcctaagtgt

SEQ ID NO: 360 - DNA, 213 bp, Homo sapien
  misc_feature (1)...(213): n = A,T,C or G
actacagtctggctnacacgagtgagacctcatctcaaaaaataaaaaaaagtaaaaaataattttaaaagagtgatttaaaaagtaagcatactgatacaggttcccagtcccttacccacagttctaaaatcccaaatctctgaaagccaaaacctttttcattattttgngggaaannaattatagcatcaaaacctgaatttatgtggt

SEQ ID NO: 361 - DNA, 391 bp, Homo sapien
  misc_feature (1)...(391): n = A,T,C or G
agcgtggtcgnggngcgaggtaccctaccttcaccnccctctttgtaagttggtgacttgcatctgtggccttgaatattttattatcacatgtggcataacagtatccacactttttagttctttattttttttttttattttgagcaattctcctgcctcagcctcccaaatagctgggattacaggtgcatgccaccacacccagctaatttttgtatttttagtanagacaggntttcaccatgtttanccaggctggtctcaaactcctgacctcagatgatccgcctgccttggcctccccaaagtgctgggattacaggtgtgggagccaccaatgccntgacccacacacttttttacttgtatagatgatttttggccttgg

SEQ ID NO: 362 - DNA, 366 bp, Homo sapien
actcactggaggtctgagaaccttaaaatgctgtcgctacattttttttcccttccaattcagaaagcaaagtgttaccatagtaacaggactatgttaaagatgtctattttgcatagcacataaaaagtaggtttcctgtttactcttcttgtttcccagaagggagggggtgcgggggaggacaggaggagggagccacagctaaatcgtcacctgaagcccccagtgtgacctgctggattctagagaacacttcagcccataaggcaagggaaaacccaacgcagaaataaacgccggaacatcttgtcattgttaaatatatgatgcagtcacatcggcttcctgctctgtggggctcgt

SEQ ID NO: 363 - DNA, 320 bp, Homo sapien
acttggggtggcgggtcaggctgcggagctcgtggatgccgtgtgtgaactggcacttgtccccgtactctgaggcttgtaggagggtaaaatagagacccagtaaaattgtaataagcagtgcttgaattatttggtttcggttgttttctattagactatggtgagctcaggtgattgatactcctgatgcgagtaatacggatgtgtttaggagtgggacttctaggggatttagcggggtgatgcctgttgggggccagtgccctcctaattggggggtaggggctaggctggagtggtaaaaggctcagaaaaat

SEQ ID NO: 364 - DNA, 492 bp, Homo sapien
actcaagcaccatactgtagtttgttttaaacagctggaagtcaccaattgttcaaaaacagtgtgtattacataatcaatttcaaaagattatgtaaagaataaatgaggatatttgtaaggtgcttagtgtgcttatgtatgtgtgctaaatgtgctatgccttacacatagaggacacaattttaatgtggataattggtattcaaattattactcttaaatcacattctcttttctcaaagcaaaaagaataaagaaaaacgcaatacattctagtcattgaacatttatagacatttaaacccaaggggaacactagaggtcatttggttcaagttccttgttttactggtgagaaaactgaagaccagagaggccaagtgacaggtccacagtctcatagggagtaagggagtaatggacaaagattagaaaccgcagctctcaactctttgactagtgtcttgtagaggaagcctttcatgctgt

SEQ ID NO: 365 - DNA, 175 bp, Homo sapien
ccgccttctaggccgtaacggaattcctgaaggttggagactccatagaagtggacaaaggctgctgccaccaccaggacatggaaaatctgatgagactggaaccatatgtcaaattttccaggaaagaagcgctcaggaattcgagcagcataaaggccagctccagtgatgt

SEQ ID NO: 366 - DNA, 279 bp, Homo sapien
ttttttttgctctagagggggtgctatagggtaaatacgggccctatttcaaagatttttaggggaattaattctaggacgatgggcatgaaactgtggtttgctccacagatttcagagcattgaccgtagtatacccccggtcgtgtagcggtgaaagtggtttggtttagacgtccgggaattgcatctgtttttaagcctaatgtggggacagctcatgagtgcaagacgtcttgtgatgtaattattatacgaatgggggcttcaatcgggagt

SEQ ID NO: 367 - DNA, 393 bp, Homo sapien
  misc_feature (1)...(393): n = A,T,C or G
agcgtggncgcggcgaggtactctgctatnncnctggcttcctttaaactcaggatagatgccaggtgggctccgtttccgtaagactgacactcgagctcggcatcagaccagttcctcagcttcctgaagtaaccatagcaattggacttgtggtaaaaccatccaggagcacagctgggtctcatgatgatatcacccaggactcctgttttggccaggcagctcagcaataggagcagccgcatgcttctggaagccatcttcctcctaccctgaggatgtggctagtgcaaggatctcagagaccttactagcgcttntttgaaactcctgggttctccttgatctgcaaatctgttcggcaaaccaagactctaagggcccctgcca

SEQ ID NO: 368 - DNA, 396 bp, Homo sapien
acctttgatgtgcctaatagtttcagatgtcttagttttttataaccatagttgattaggccaagaggcattcatttcttatttaagctggcaaaattagcaggaattagagaagtttaaaaagataaatggttttatgataatgttaaccatcttttgttagtaaatatgcgttctattattttaatcattgatgccttacaaaagaaaacatcttttctaataccctgaatatgtgctgttcttagaatcatctatggattcttttaaaggttgtttgtgaaattagttttccctttttagaatctcaggagtagtggggtaaagacatttcctgctgtcagtggataagacagagcttgttaactgttttggcagtagttaaaatcaaattgt

SEQ ID NO: 369 - DNA, 297 bp, Homo sapien
ctcagagcccctccctgctaccaaggcccagctatggccccagggttgaaaagttatgagggtcagggcagtatctctctgcctatttattggggtgcctatttattggggatctgcattccccgctgcccaatcatttgcaatgccctaattagggcatcctgcccctcgccttttaggctcaggacggaaggtcagttgccatggttaccgaggaccctggttactctggtgctgtcctgttttactggaccccgcctcccagccccaggggtgcctgtgggggtccatttgggt

SEQ ID NO: 370 - DNA, 435 bp, Homo sapien
  misc_feature (1)...(445): n = A,T,C or G
acatttgatgtggnnanatgactctaagaaatgctgaagtattggcattacatgtgtttactagtatgataatgttgattcaatctgaacaaaagataatataaaaataacccttcagagtttggacatttcaagttggtaataataaaaaataatatttaagaagatatatatatatatatatttagttttttccacttcattttacatgccactatattgactttaattgatatacagtattaagtttttaggtgccattatttttaaaaaattctatatttccaatgaacgatgttagattttacacagaacatattctctgcatgatttcagaaaagaaaatctaaaaaggtaatacgggtatttcaaataaaatcctttctggtatgaaaggctccattgattttattaagccttcctttaccttgtagt

SEQ ID NO: 371 - DNA, 506 bp, Homo sapien
  misc_feature (1)...(506): n = A,T,C or G
caggtacaggtggtcttcnagggatagcacgaggtggtctgacaggactaacacttaccagcctctatgcactatataataactgggagcacatgaaaggctccttgctccaacagtcactctgaagattttgccaactcatgaatggaggacacttcagtagtcatctagatccttttataagacagtttggagttattctctctcttctacctacaattagtttgaaaaattggagattttgatttgctgtgatgaaaatcctggatggctgaccaagactggcacttgttccagccattagtgagttgaagccaaagccctttggtgactcactgagtactcgcccaactcccggccactccccgacatcttgtagccaccaaagggtgactgggctccaaacacatcatagcagttgacccacacagtgcccgcctggagggcctgggacaggtaattggccttgtccaaatnctttgtgaagacagctgcggncagcccgt

SEQ ID NO: 372 - DNA, 343 bp, Homo sapien
caggagtctatattctgatcggagccggcgccctcatgatgctggtgggcttcctgggctgctgcggggctgtgcaggagtcccagtgcatgctgggactgttcttcggcttcctcttggtgatattcgccattgaaatagctgcggccatctggggatattcccacaaggatgaggtgattaaggaagtccaggagttttacaaggacacctacaacaagctgaaaaccaaggatgagccccagcgggaaacgctgaaagccatccactatgcgttgaactgctgtggtttggctgggggcgtggaacagtttatctcagacatctgccccaagaaggacgt

SEQ ID NO: 373 - DNA, 496 bp, Homo sapien
  misc_feature (1)...(496): n = A,T,C or G
actattgacccancgangggggcttcgacatgggctttagggagtcataagtggagtccgtaaagaggtatctttactataaaagctattgtgtaagctagtcatattaagttgttggctcaggagtttgatagttcttgggcagtgagagtgagtagtagaatgtttagtgagcctagggtgttgtgagtgtaaattagtgcgatgagtaggggaagggagcctactagggtgtagaataggaagtatgtgcctgcgttcangcgttctggttggctgcctcatcgggtgatgatagccaaggtagggataagtgtggtttcgaagaagatataaaatatgattagttctgtggctgtgaatgttataattaaggagatttgtagggagattagtatagagaggtagagtttttttcntgatagngttcactggataagtggcgttggcttgccantgattgtnaggggtaggagtcaggtngttagtattagga

SEQ ID NO: 374 - DNA, 515 bp, Homo sapien
actggataaaagtaaacttcaaaccttagggcgggagcactaaaaccaaaatacatgtattatttatagaaaatattttctgttttaatcttttctttttaaacaaggactcatacttaaaaaaatgtttagcaaaaaaaaaaaaaaagttgagaacttttaatttattttaaggactgcaaatgccagtgtaatttttttaatttgcagtttctgtaaacaacttgtataatagaaaagcagagaaataaatttccctccccttcaagatgcacctcatgtttgttttaaggtatagcatttagtccagatttgagaaagtttggggtgaacaaggtaagaaagatttttttttttggcatcaaatctttctgcctgcctctcagcttgcttcagaaaatttaaaaaatcacaatagtaatcaaaacatacataacattgaaacagaaggaaatgctgtggaccacagaactccaagaattgtttaaaaaaaaaagtgctaccctgagaaaagt

SEQ ID NO: 375 - DNA, 196 bp, Homo sapien
  misc_feature (1)...(196): n = A,T,C or G
accattggtggccaatngatttgatggtaanggagggatcgttgacctcgtctgttatgtaaaggatgcgtagggatgggagggcgatgaggactaggatgatggcgggcaggatagttcagacggtttctatttcctgagcgtctgagatgttagtattagttagttttgttgtgagtgttaggaaaagggcgta

SEQ ID NO: 376 - DNA, 340 bp, Homo sapien
  misc_feature (1)...(340): n = A,T,C or G
acgtgtggcttgntcacttcgtggctaaggtaagaacgtgcttgtggaagacaagtctgtggcttggtgagtctgtgtggccagcagcctctgatctgtgcagggtattaacgtgtcagggctgagtgttctgggatttctctagaggctggcaagaaccagttgttttgtcttgcgggtctgtcagggttggaaagtccaagccgnangacccagtttcctttcttagctgatgtctttggccagaacaccgtgggctgntacttgctttgagttggaagcggtttgcatttacgcctgtaaatgtattcattcttaatttatgnaangttttttttgt

SEQ ID NO: 377 - DNA, 387 bp, Homo sapien
acatcaccgacggctaccgggcctacctgccgtccaggctgtgtatcaaaagtttgtttattttatctaatgagacagtaaacatctggagtcatttgctgggtttctttctcttcttcaccctgggaatatatgacatgacatctgtgttaccttcagcaagtgcgtccagagaagattttgtaatttgttctatttgtcttttctgcttccaggtctgtatgctttgctctgtgggctatcatcttttttcctgccatcggtcagaaaaaacatgtcgaagatggatggcattagattatgcaggaatttctattggaatactgggctgctatgtctcaggagtattttacgcattttattgtaataactactggcgtcaggtgt

SEQ ID NO: 378 - DNA, 369 bp, Homo sapien
acttctggaaaaaaatgcaaatggtttagccaggatctttcctgtctgattcgtcactattattatatctgatgatgcgaatggttggagcgattcaatcctaagtcattaatgagctattttataaacaccactgtctgaagatcttcatttacattttgctaaggatcacttcgctaacctcacaggcttgtgtcaacagcatgatttgcaggacttcagttacactcttataaacaacacggctgtattgttaatcggttaatattttataaagtgtaaatattttattatgttttgaagggaactattgattctaaattattaaacccctgagaaggactatttaaatgaaatatacaattaagt

SEQ ID NO: 379 - DNA, 193 bp, Homo sapien
accattggtggccaattgatttgatggtaagggagggatcgttgacctcgtgttgtgtaaaggatgcgtagggatgggagggcgatgaggactaggatgatggcgggcaggatagttcagacggtttctatttcctgagcgtctgagatgttagtattagttagttttgttgtgagtgttaggaaaagggcgt

SEQ ID NO: 380 - DNA, 216 bp, Homo sapien
  misc_feature (1)...(216): n = A,T,C or G
ctcccccgtggtgtaggccacgtggtgaccctcannacgctggatcaccacacggtgcttgtcttccaacttcagctccgtcctccccatgaagatcttgatggccttggagcaggtgacncccgnantgccacaggggacgttctnngngatgatgctgaatgagcccagngagganttctggccgcagtagtcctgaacagccacgtaggagca

SEQ ID NO: 381 - DNA, 353 bp, Homo sapien
gtttgaccagtcacagattcaggagttcaaagaggccttcaacatgattgatcagaacagagatggcttcatcgacaaggaagatttgcatgatatgcttgcttctctagggaagaatcccactgatgcataccttgatgccatgatgaatgaggccccagggcccatcaatttcaccatgttcctgaccatgtttggtgagaagttaaatggcacagatcctgaagatgtcatcagaaacgcctttgcttgctttgatgaagaagcaacaggcaccattcaggaagattacctaagagagctgctgacaaccatgggggatcggtttacagatgaggaagtggatgagctgt

SEQ ID NO: 382 - DNA, 340 bp, Homo sapien
ggacttttttagacagatcttcatggcctgttcccaccccagttcatcatcatctcttttacaccaaaaggtctgcagggtgtggtaactgtttcttttgtgccattttggggtggagaaggtggatgtgatgaagccaataattcaggacttattccttcttgtgttgtgtttttttttggcccttgcaccagagtatgaaatagcttccaggagctccagctataagcttggaagtgtctgtgtgattgtaatcacatggtgacaacactcagaatctaaattggacttctgttgtattctcaccactcaatttgttttttagcagtttaatgggtac

SEQ ID NO: 383 - DNA, 195 bp, Homo sapien; identical to SEQ ID NO: 8

SEQ ID NO: 384 - DNA, 270 bp, Homo sapien
  misc_feature (1)...(270): n = A,T,C or G
actcccgattgaagcccccattcgtataataattacatcacaagacgtcttgcactcatgagctgtccccacattaggcttaaaaacagatgcaattcccggacgtctaaaccaaaccactttcaccgccacacgaccgggggtatactacggtcaatgctcagaaatctgtggagcaaaccacagtttcatgcccatcnncctagaattaattccnntaaaaatctttgaaatagggcccgnatttaccctatagcactncctctagag

SEQ ID NO: 385 - DNA, 358 bp, Homo sapien
  misc_feature (1)...(358): n = A,T,C or G
atggccccanccatagcatgggaggaaacttatagaaccattggcctatattgggttggatctattattatgagtgttgttgtttttgtgccaggaaacattgtagggaagtatggaacacgaatttgccctgcttttttcttaagcataccatatacttgtcttcctgtctgggctggtttcagaatctataatcagccatcagaaaattataattacccctcaaaggttattcaagaagcccaagcgaaagacctgctgagaagaccatttgatttaatgttggttgtgtgtctcctcctggcaactggattttgcctgttcagaggtttgatttgctttggattgcccatctgag

SEQ ID NO: 386 - DNA, 251 bp, Homo sapien
  misc_feature (1)...(251): n = A,T,C or G
tccagcaaaaccagaaatacgaatatatttttctgggctttcacatttgttgatttttattcgcgatctttttcaatacaatttacaccctcatccccatttccagtctgattatacaagtgctaagtggcagaaaggtctggaataaatacatcaaaaagaagaggcanagctgtgaaactaagttgcatgcaacaggttntatgagggtgggggaagtgtctganaagtaanagagagtaagacaatgt

SEQ ID NO: 387 - DNA, 313 bp, Homo sapien
  misc_feature (1)...(313): n = A,T,C or G
ggagacggcctgngtgctggcgaagcggaggccggagttaatacacgaggaactcatgcaaaggaggggactttcggaaatccaaacttagagtgccttgtatttagaatccggaaggaaaaggaaatgaaatgtgaagaaactcatgcaccaaactcgaactggtaagaagactgttagaatgccctcggtaacacagaggctgagagatcctgacataaatccttgtttgtcggaatctgatgcttccaccagatgtctggatgaaaataactatgacagggaaaggtgttccacttacttcttgaggtac

SEQ ID NO: 388 - DNA, 580 bp, Homo sapien
  misc_feature (1)...(580): n = A,T,C or G
actccatctctttgactgaataggtcattgatcctatcaagggataacaatgtttttgccactggatgttgatgttcctatccaaatccacagcaagctggtgttgcaattttccagattcatgcagatccactgacttcagtgctgataacaaataggcaatcccaaaataaaaggaggatatagttaccaagattgagtagatataaagatagaagagatttgattggtataattaaataagctaatcatgtctaatttattataggtttagatgaggggatgtttttgaaaattatttgaacagtcaaaagtgttacgtagcatcttggattaagatggtggataggaggcaggactagcttgcagctctcactcagacaaacagagcagcctgtggagactcacatcatgaacttctgctccaagaactgccacaggaacataccaggaaagtcagaagaatccatagaccctttgaaggaacaggatcaccactgcaggctctctgagatgctgaaaaactgtgtccctagggcaagtttncatcctgcctgtangacagcagctgatgtgctct

SEQ ID NO: 389 - DNA, 379 bp, Homo sapien
gaagaaggcaggcgcccttagagtcttggttgccaaacagatttgcagatcaaggagaacccaggagtttcaaagaagcgctagtaaggtctctgagatccttgcactagctacatcctcagggtaggaggaagatggcttccagaagcatgcggctgctcctattgctgagctgcctggccaaaacaggagtcctgggtgatatcatcacgagacccagctgtgctcctggatggttttaccacaagtccaattgctatggttacttcaggaagctgaggaactggtctgatgccgagctcgagtgtcagtcttacggaaacggagtccacctggcaatctatcctgagtttaaaggaagccagcaccatagcagagt

SEQ ID NO: 390 - DNA, 435 bp, Homo sapien
ttgtaaacctaactatggtaatattttaaaaggtaaattatggtaaattattagctcataagaagaaaaaatctttcaactctaacgttaaggctgactgaattaaagtgtgctagagtgttctatattagtttgagaataattttataagatgaacgaggagagaacttattactgaactattaactttcaaaataatctgcattttcctttttccctaagtgttcatgctattctgtctgctaatacttcaggttaaaaccttcatcctttggtgtccatttttgtaaccttggaccattttaatgttttttctactggtaaactagatcatatattccaggtcatttggatttttattttacttgtcacatatatctagttttactagatttagaagacagcagtctgctttaatccttttgtatctaccgt

SEQ ID NO: 391 - DNA, 283 bp, Homo sapien
  misc_feature (1)...(283): n = A,T,C or G
ttttttttttttgctctagagggggtgctatagggtaaatacgggccctatttcaaagatttttaggggaattaattctaggacgatgggcatgaaactgtggtttgctccacagatttcagagcattgaccgtagtatacccccggtcgtgtagcggtgaaagtggtttggtttanacgtccgggaattgcatctgtttttaagcctaatgtggggacagctcatgagtgcaagacgtcttgtgatgtaattattatacgaatgggggcttcaatcgggagt

SEQ ID NO: 392 - DNA, 441 bp, Homo sapien
cttttctccaatacctgccaatacagaaaactattatcagttgttattgttatcccttgaaagcgagggtgacaaaaacaacaaaacaccgttataaacacatcaaaggttcattctgactgaggtaagactttccaagcccttgttagattaggccttataaaacttgtgtgcattataacctaagctgtgcaacctgtgaagccaagagtgaactgatgtttcatttatattttcatccaaatgacattatctgcacgtttttaaaatttaaaaacaaaggactatttaaaaatacagtttattaacaaacgtgaactactttctgttacattaggtgttccctagtgtttcttaatttctttttagaaagtgtatttttattagtatttttccggtgaacagaagatttgtttggatttaaacatttactaagacagt

SEQ ID NO: 393 - DNA, 481 bp, Homo sapien
  misc_feature (1)...(481): n = A,T,C or G
atttaaagcaatatcnnnagggcacccaattattgaatgagaaaattttcaattctggccatgagaaagaaaaaaaaataaacagccttctttttttttcctttgttttaaaactgtggttttttaaaaaagcaataattaactcagacctcactaaaaatcatttttgtttttatattgttatgtcataagctctattatgttattctaacaagtagcaatttcacaaaatttgtatgtagatgttaacgcacatttcctttgcttcttttattagactagtgttgactttggggggggacatttattcacaaatgagaagtaggcacaaagtaaaaaatggaaccatctactaacaaggatcctttaaaactgccaagggagctntaacttgaaggccacatcctanagatgggcagnccaaatagcacatgggcaaatttggcancatctttttatatggttgagtctnctgaatatt

SEQ ID NO: 394 - DNA, 460 bp, Homo sapien
caggagttcaagactagcctgggcaacatgccgaaaccctgtctctaaaaaaaaaaaaaaaatttggccgggtatggtggcagtaggatcgctcaagcccaggaggtggaggttgcagtgagccaagatcacgtcactgcactccaggaagggcaacagagcaagactccttctaaaaaaaaaaaaaaaagaaagaaagaaaagaaaattaactttggtatttcaggttgtatttaaatggagacttaacatgaactatgttcataacacttgaccaaattaagtgtagatcgtctctttaataaagagatcatctggaactgcaatttctaactcatacatcattgctacaaaccttatttgtttactatttctcttccaaggaccatcagtcatcctttaaaattcatttcaagctctgaaaagatattttttgttacatgggcaatttacttttagt

SEQ ID NO: 395 - DNA, 573 bp, Homo sapien
ttctttattttcaatatttgtcttattaatatttttcttattttataatgcaattacaacaatttaggagacaaaacaatataaacaaaagaatgttaaatagttttttttaaaaaatagcttgttgcttgcaagaaagtccatataatcttattcccccccaaatataattttatactttgcactaaaccaaaatagcttatggaaaattagtattaaatagctaaacacagaaaacctacagctataaataacataaaatacagtttaactttaatgtgatgcttaaacaaagcaaactatgatgcaatatgaatcaacttcattaattggacaagtccagtgaggcacaaattagataagcactaaaccctccatgatgtgcaagtgaaacctccaaccccagcaaggttctttctgttcttgggctatgtccaattccattccagaaaagccacagtttttacatgttcttgacttttttactgaggagacgcacaatatatttcacccaagtctgttttggatttgcgcacacagacaactttttctttgtgtgaaagatgatagcat

SEQ ID NO: 396 - DNA, 460 bp, Homo sapien
acagctaaaggacaactcccgaaggtcaaatgaatacacacagtccgtgagtcagaaatctggagggctgtgtggacggagacattgctcccgctgttttgctgctgtgaaatgctcagtgaaacctaattgaatttgacaattataaattacatattgaaaccgtatagttcacctaaggaatagcaatgaaaacagtgaagacaccagaagccagagttcaggaaatgtcatattcacatagaaatactttaaatttttctcaaagctttattttctcttttttcaagaaaagctccagaccacccagttgcactggtggaagtccttttgggaagctgtactcttccatgactggcttttattctacattatatttgtgagattcatcagtatagttgtgtgtatttgtagatcttttattctcatttctgcatatattttattatgtgaatgtacc

SEQ ID NO: 397 - DNA, 61 bp, Homo sapien
  misc_feature (1)...(61): n = A,T,C or G
ggcttatcaatgccccattccacccaagcacacaagagctcnttatcnctaacatcactat

SEQ ID NO: 398 - DNA, 337 bp, Homo sapien
actggaccagccaatcaataccacagacctgcctttccacattgactggaatgatgatcttcctctcaacattgaggtccccaaaatcagcctccacagcctcattctcgacttttcagcagtgtcctttcttgatgtttcttcagtgaggggccttaaatcgattttgcaagaatttatcaggatcaaggtagatgtgtatatcgttggaactgatgatgacttcattgagaagcttaaccggtatgaattttttgatggtgaagtgaaaagctcaatatttttcttaacaatccatgatgctgttttgcatattttgatgaagaaagattacagt

SEQ ID NO: 399 - DNA, 476 bp, Homo sapien
  misc_feature (1)...(476): n = A,T,C or G
acatttttttaggnctcttaaactttaatttcacacagtaaattttgaatctcataaggaagcatatttgaacctagtcaatttaatcttagtgttcccttgaaaactttttttccctacaaaattttaagtgaaaaatacaatagtaaattaagattacactggggaaaaaaatgcaggtatcactttactccattgttatctgacctagagcttaattaagttttagaaatatgtaataccttccatcattccatcatccttaaattctgttaccaaataatggctaatgttacaaaaagttatactccagagacccaaagcttgacatttacctaatgtatgagaaaatattaccaattaacaataaagaatgatcatatttttaacctcttttacatagcctaataactcaggcaaggccncaacgtctgtgctaaatttaaactgccaaatattgactgcagcaaacaaga

SEQ ID NO: 400 - DNA, 195 bp, Homo sapien; identical to SEQ ID NO: 8

SEQ ID NO: 401 - DNA, 501 bp, Homo sapien
gcaagtttgctgagctgaaggaaaagattgatcgccgttctggtaaaaagctggaagatggccctaaattcttgaagtctggtgatgctgccattgttgatatggttcctggcaagcccatgtgtgttgagagcttctcagactatccacctttgggtcgctttgctgttcgtgatatgagacagacagttgcggtgggtgtcatcaaagcagtggacaagaaggctgctggagctggcaaggtcaccaagtctgcccagaaagctcagaaggctaaatgaatattatccctaatacctgccaccccactcttaatcagtggtggaagaacggtctcagaactgtttgtttcaattggccatttaagtttagtagtaaaagactggttaatgataacaatgcatcgtaaaaccttcagaaggaaaggagaatgttttgtggaccactttggttttcttttttgcgtgtggcagttttaagttattagtttttaaaatcagt

SEQ ID NO: 402 - DNA, 579 bp, Homo sapien
  misc_feature (1)...(579): n = A,T,C or G
gtgcggaggtgctccncncagagttgnttctcgagcagcggcagttctcactacagcgccaggacgagtccggttcgtgttcgtccgcggagatctctctcatctcgctcggctgcgggaaatcgggctgaagcgactgagtccgcgatggagaaaactttagaaactgttcctttggagaggaaaaagagagaaaaggaacagttccgtaagctctttattggtggcttaagctttgaaaccacagaagaaagtttgaggaactactacgaacaatggggaaagcttacagactgngtggttaatgagggatcctgcangcnaaatatcaagaggatttggttttgtaactttttcatccatggctgaggttgatgctgccatggctgcaagacctcattcaatttgatgggagagttagtttgagccaaaacgntgctgtngcaagagaggaaatctggnaaaaccagggggcttnatgtaactgttgaagaaagctgtttgttggcggaaatttaaagaaagatactgnggaacatcaccttanagattactttgnggaatatggaaaaaattgat

SEQ ID NO: 403 - DNA, 373 bp, Homo sapien
acaatctcggctcactgcaacctccacctcccaggttcaagagattctcctgcctcagtctcccgagcagctaggaccacagatgtgcatcaccatgcctggctaatttttgtattttttagtagagatggggtttcaccatgttggtcaggctggtctcgaactcctgacctcaagtgacccgcccttgtcggcctcccaaagtgctgggattacaggcatgagccactgtgcccagcctatatagtgtgaagcttttaggaaaatcagagcagggtagacagctgttaaaaacaatgtttaaatggaataatgttgaatgtttacaggctgtaagaactattgtatacacaaaataatacacaaagtttgt

SEQ ID NO: 404 - DNA, 414 bp, Homo sapien
accgtgaggccctagcagacgaggccgacagggccagagccaaggccagagctgaagccagtatgagggccagggccagtgctagggccggcatccacctctggtgagggttggtgaaaagttggccagtgggtccccgtgaggacgaactactgtcctgagtcataagtaatatgggtggggcgagggtcttatttctgtagaaatcgtgtgactttaaggatttagattttgtatcttatgttttgtaacatttaataattactgttaaaatgctgtttgtaaatgagattggtctactttttcctgtaggattttattgtagagttttgctggttttgtaaaatggatggaagaactttgtatttatactgtgattttgaacagattatgcaacattggaaggaaggctgt

SEQ ID NO: 405 - DNA, 293 bp, Homo sapien
  misc_feature (1)...(293): n = A,T,C or G
aggaagcgnnnaaacaccatatcacagattgtctgtcagtaatctgctgttcagccaagagagttcaaagggagcagtttctgcatgtagggaagttggaagacacaaaccccacctcccctgggagcttgtaacaaagcagacagggatgcaaaaataaatgatgtcagcctgcagccaaactccagcatcccacaccgcagctgacccactgctcatcgcgagggcctgccaggagctggcctcccgcactacttgtgagtaaagtgaatatcaaataccaatcttagagt

SEQ ID NO: 406 - DNA, 201 bp, Homo sapien
acattaaaatacagtgttattgacctaacacttgacccaacataaatattattaataaaatgggaatattaatattaaccaggcacactgttatccctgcccataagtttgatggcgccattcagacttgcggcaactctggatcccctgaggtaactctctcatattccttctttggttctttactttttcgatttctgt

SEQ ID NO: 407 - DNA, 496 bp, Homo sapien
actattacctgaatgcttctattccttttttgatcttcgaaaagaattcaagaaatgttgccctggttcacctgatattgacaaactggacgttgccacaatgacagagtattaaattttgagaagagtagttcagtctctcgatatggagcctctcaagttgaagatatggggaatataattttagcaatgatttcagagccttataatcacaggttttcagatccagagagagtgaattacaagtttgaaagtggaacttgcagcaagatggaacttattgatgataacaccgtagtcagggcacgaggtttaccatggcagtcttcagatcaagatattgcaagattcttcaaaggactcaatattgccaagggaggtgcagcactttgtctgaatgctcagggtcgaaggaacggagaagctctggttaggtttgtaagtgaggagcaccgagacctagcactacagaggcacaaacatcacatggggaccc

SEQ ID NO: 408 - DNA, 510 bp, Homo sapien
ctcaaaacaaatgataaccatacacaacactaaaggacgaacctgatctcttatactagtatccttaatcatttttattgccacaactaacctcctcggactcctgcctcactcatttacaccaaccacccaactatctataaacctagccatggccatccccttatgagcgggcgcagtgattataggctttcgctctaagattaaaaatgccctagcccacttcttaccacaaggcacacctacaccccttatccccatactagttattatcgaaaccatcagcctactcattcaaccaatagccctggccgtaccaagactgagaggccccctcccaggtgagctggatcttcaagaggtctcccaagtcctcctcggtgtagaccaggaaggtgttggtggcattctgctcgatccgctccactatttccagtggcagagtctgggaatctgcattagtgccataaagggtgacgtaaaaggtgggctcaatttctcccatgttct

SEQ ID NO: 409 - DNA, 462 bp, Homo sapien
acctagaatttcatagtaaggcagactgtcaagaagagcatcaaagtgaagacattttctgtcaggcaaattttcagaaagtctcctttgcacccttactgaggaagtatcttgaggaaattctccagcaaaatgaggatgaaaaccaggaaagaagaagaaataggatccataaaacagtggaccttacttaggatgtctcattctagagtgacagccaaaagggtatctcaccctagagtgacagctatccagcagactaatttcagatgagagcatactgtctcgggctttctgggaagaatgtgcattcagtgccatagatagtatcattgaagagctgggatgcttgagaagattatttagtcaagaaaaaagaaagacaaatcaacaatatgtcaaaaaattcaggtccaattatagagcaaaataaaatgaggcatgattttgagttattcatga

SEQ ID NO: 410 - DNA, 215 bp, Homo sapien
ccagcttgtgaaacgtgtcatcgaaggcagcctgtctcccaaagagagaactcttctcaaagaggaccctgcttactggtttttgtctgatgaaaatagtctggagtataaatattacaagctgaagttggcagaaatgcagcggatgagcgagaacttgcgaggagccgaccagaagccgacctcagcagactgtgcagtgagggccatgctgt

SEQ ID NO: 411 - DNA, 351 bp, Homo sapien
acacctttaattgaaaaggtgagaaaagctccatactgtgatgctatgatttccccaaggcttaccttctataagtagtcactgataaagtgccattgacccgcatttgtttagaattatttcattaaaattggggtatgatctagcagtttataataaatatttatggataattttattggcttttaaaagatactgtaaaattgacatatctcaaaatggagttaatttatatttacaacaaaccaaacacaaacatcaattatggaattacagggtcacattttaattcctgaattttacagtttagcattaatatcaccacatgtatacaaatggtgtaaaacaagt

SEQ ID NO: 412 - DNA, 536 bp, Homo sapien
acaaaggtaagtcccagctgctggaggggttgccacactggcgaggagatgtgagagatcgtggccatggaaggccctggcagccatccctggagccctcactccctcccactctgtgctttccccccctctcctccttctcctcctcctggccctcagcccagcatctcacaccctcagttttcaatccctggtaagattgctcaattctgttttgttgtgtggatttgagtttgattttggtagaagtgtagttgtgttttatgttcaggtgtctcttgatcacagtaacccatagtcccccactggggggacggtgggggaagactttgggaggattttacccagaatacttgccgcctgctttttgtcctccaggaaaccagaagcccgggtaattaggtaggccggggagcagcgttgagtcagatggaatgcaggagtgggaggcctgtgctgattagcccaagccctttgctgttacagaatgtccccaaaattgctatatgaaagcaacccttcgattcacatatgat

SEQ ID NO: 413 - DNA, 479 bp, Homo sapien
acatttgaacacacggctgtgttaaagatgctgctaatgtcagtcactgggtgcactaaaggatctcttattttatgtaaaacgttgggattgacaagatagatctgacactctgttaagttaccctctgaagctacttcttgtgaaatactaatgacagcatcatcctgccaagcgaaagaggcaggcataagcaaggacaaattaaaagggggtaagagccttatcatgatgaggagtcttgttttgacatcttgggaaaagctgtccatagtgtgaagtcgtcaatttctcaccatggtttgcagtttgcctgtctctagttaggtgaagtctctgagtggcacacacctcaggcctgagggttttccctttaaattttcattgagttgtccatctccagcatatagggcttcaggagcagagcagaccttgtttttagtggttccatgggataaaatgggattggaggagctaga

SEQ ID NO: 414 - DNA, 383 bp, Homo sapien
acctgcaatatatttggagtattatgtctttattgttgttaaaaagtttttattgaatgtatgaaaattatcaaattgtattcatcattattaacatgtcctggggaaggaagggaaactttctaggacagaagtcactttcagatgtcatgtatgtattgggtgttcaatcatatctaacactgttttgatttttgtgggaaaatattccaggaaacgctaattctctttagactccttgttcttttatgactacaatgaacatatgtctatgtgatagctaaagatatttttgaattgtatgtgtgcttaattatcggtaagtataaatatttgagaaaacacctggtctggatatttaaaaccctcataaacatgttggt

SEQ ID NO: 415 - DNA, 349 bp, Homo sapien
  misc_feature (1)...(349): n = A,T,C or G
tttttttttnnntttttttttttttatttggtttcggttgttttctattanactatggngagctcaggtgattgatactcctgatgcgagtaatacggatgtgtttaggagtgggacttctaggggatttagcggggtgatgcctgttgggggccagtgccctcctanttggggggtaggggctaggctggagtggtaaaaggctcaaaaaaatcctgcgaanaaaaaaacttctgaggtaataaataggattatcccgtntcgaaggcctttttggacaggtggtgtgtggnggccttggnatgtgctttctcgngttacatcgngccatnattggtatatggttagt

SEQ ID NO: 416 - DNA, 305 bp, Homo sapien
accattggtggccaattgatttgatggtaagggagggatcgttgacctcgtctgttatgtaaaggatgcgtagggatgggagggcgatgaggactaggatgatggcgggcaggatagttcagacggtttctatttcctgagcgtctgagatgttagtattagttagttttgttgtgagtgttaggaaaagggcatacaggactaggaagcagataaggaaaatgattatgagggcgtgatcatgaaaggtgataagctcttctatgataggggaagtagcgtcttgtagacctacttgcgctgca

SEQ ID NO: 417 - DNA, 129 bp, Homo sapien
  misc_feature (1)...(129): n = A,T,C or G
acttgatgacncccacccctcatcattcaggaacagttaactaccaaatgaagcacactggagattgaccagtttgcaaattcactacttcacagctccaaactaaatgcaaaaccattctactaagta

SEQ ID NO: 418 - DNA, 530 bp, Homo sapien
gatgtaaaagctcaaaaattgtgattccttgaacgttcactaaatcttcaagcaaaaacacatttttacattatttttacgttgattattttagtgaaagaccatatgaagaagcatttttaatattaacttgttacatactttgatccactttacatcatttttatgttgttgaggtagggaaattagggttcagtttatcactggacattcaggaggcaagtcaatcctttttatttccttataaaattaactcttcaaaagccgttaaacagagagttatcttaatttttattgcagtaggaggaaatatatttaaaatatttgtagatttatagcaaatagagactcgttatttaaaggttaaataacaatttgttcttttgttgtttttgccagtttagggcagtagctgcttttgtcataaatatcttcctaccacatcaaaaatgctgcttttaaaatttttgtttataaattgagaaggaattttctctctataagtttctgtcattgaacagatcaccatt

SEQ ID NO: 419 - DNA, 262 bp, Homo sapien
actttctggtcttcatttaggaattataaattcatgacaaaagaacaaattttttatggaataaataacttccaggaacaacagtttataagtattcagttgtttaaataaacaaaactattttccttcctaaaatgtaaacatccagtaaatgaaacatacatgatattccaggtatagaaatcttagtaactcacttatgaaagaggtgcattttggtatgtttggtggtaaggtttttgtttatcttatgtataaaagt

SEQ ID NO: 420 - DNA, 410 bp, Homo sapien
  misc_feature (1)...(410): n = A,T,C or G
actgaaattagtanaanctaggccaatgatccatgaattgttaactgaagggcggagatcgaagactaacaaagcaaaaacccttgctacatgggcaacaaaagaactgaggaaactgaagaaccaagcttgatctgttaccattgggatgataacctgaggacccccactggaaatctcccatcttttgaaaaacctggaagtgaggagtgtgcacggatgctgaatgtttgggaatgagaggatgagtgagtgaggcttgaaaacacaccacattgaaaatcctgccacagcagcagccgcagccgccaacagcagcgctgttagtgagctaagtaagcactgacttcgtagaaaaccataacatcggccatcttggaaaagagaaaaacaatggagttacttatttt

SEQ ID NO: 421 - DNA, 235 bp, Homo sapien
gttgtgctggttatttccagaaagaagggaatggcaaagtatgagaaggctgagataaaggagatgggtgagatgcatagggaactcaatgcataactatataatttgaagattatagaagaagggaaatagcaaatggacacaaattacaaatgtgtgtgcgtgggacgaagacatctttgaaggtcatgagtttgttagtttaacatcatatatttgtaatagtgaaacctgt

SEQ ID NO: 422 - DNA, 502 bp, Homo sapien
acctgtgggtttattacctatgggtttatatcctcaaatacgacattctagtcaaagtcttggtaatataaccaatgttttcaaatgtattctgtcatacaaagagcagatttttattgaacttgtgcaataactatattaccatacaatataaatattcatgaatagtttcccaagtctggagcgaccacatagggagaaaatgtaaatgtctcaatttttgttcacaaaagtatattttatcaaattgctgtaagctgtggatagcttaaaagaaaaaaagtttcctgaaatctgagaaacaagacatttaaagaatcagcaaaatttcaaataaaaaattatgaaaatattatcctcattagttcatttagtcccatgaaattaattattttctctgcttgatcttggtggacagtttcatgaagctgtcagttagttcattaaagttttggaaattctcaggacagtgcagtggtatcagaaacttgtattcaagagt

SEQ ID NO: 423 - DNA, 508 bp, Homo sapien
acctgtgggtttattacctatgggtttatatcctcaaatacgacattctagtcaaagtcttggtaatataaccaatgttttcaaatgtattctgtcatacaaagagcagatttttattgaacttgtgcaataactatattaccatacaatataaatattcatgaatagtttcccaagtctggagcgaccacatagggagaaaatgtaaatgtctcaatttttgttcacaaaagtatattttatcaaattgctgtaagctgtggatagcttaaaagaaaaaaagtttcctgaaatctgggaaacaagacatttaaagaatcagcaaaatttcaaataaaaaattatgaaaatattatcctcattagttcatttagtcccatgaaattaattattttctctgcttgatcttggtggacagtttcatgaagctgtcagttagttcattaaagtttttggaaatttctcagacagtgcagtggtatcagaaacttgtattcaagagtacctg

SEQ ID NO: 424 - DNA, 444 bp, Homo sapien
actgcagggctgagtcgctgcggaagatgctgaatgactccaccagggatgaggggacgagactccccgtagggaggatctccactctcagggacacgctggtgaagagttgggttggagggttatagagagtgaagtgcacagacacagccctggtgctgcggtcaatccacatgctggccctgagtcgggacagggctgtgtgggcttcagtccttgttctgcccaggctgagcacacagtcctcccttgtcccacagcccccaggaccattcagggtcacgttttggttctctgggtctatcaggtaggggttctcagggcctccaacttcgggactacatgtaggaatagagtcttcgatgagtgctgaaaatggcctgggaggcttgcataaatgcctaggaaaaacttttagctgcctaattacggaactgcctatta

SEQ ID NO: 425 - DNA, 617 bp, Homo sapien
  misc_feature (1)...(617): n = A,T,C or G
acttggttttacagctcctttgaaaactctgtgtttggaatatctctaaaaacatagaaaacactacagtggtttagaaattactaattttacttctaagtcattcataaaccttgtctatgaaatgacttcttaaatatttagttgatagactgctacaggtaatagggacttagcaagctcttttatatgctaaaggagcatctatcagattaagttagaacatttgctgtcagccacatattgagatgacactaggtgcaatagcagggatagattttgttggtgagtagtctcatgccttgagatctgtggtggtcttcaaaatggtggccagccagatcaaggatgtagtatctcatagttcccaggtgatatttttcttattagaaaaatattataactcatttgtttgtttgacacttatagattgaaatttcctaatttattctaaattttaagtggttctttggttccagtgctttatgttgntgntgtttttggatggtgttacatattatatgttctagaaacatgtaatcctaaatttaccctnttngaatntaatccctgaatgatattttttatcataaatgnngaataatcaaatacatttt

SEQ ID NO: 426 - DNA, 353 bp, Homo sapien
  misc_feature (1)...(353): n = A,T,C or G
acgctcaaattcataacnngccaaagctggtgataaaaggtaggagagctggtcttcccaaacagtagtgaggccaagatccttcctgtgttctgacaccaggagcctcagctgcatttcaatttcattacttgttactgacgcgtcaattgtggatgcacacagaggtggaaagggaggaagggatgttgtagctccaggagcacacacagatttaattgcttcctcactcatgggtttccatttggattcatcgttcaaatcaaatacacaggtttctactgcatcagagggttgacaatttcccaggaacatctgatggttgaaaacacaaccaattgttcgatatgggt

SEQ ID NO: 427 - DNA, 579 bp, Homo sapien
acaacatgacttaaaacttttttttttctattaaaacttaaaggggaacaaaacttgaaaaagccctgttcttcagaaggtgagtgggttgagggaggcagtaatatgaagtgactgctgtgtattttaactaccagattttttatatttgccactgttaaatagttggaaaggggaaattctgattaagcgaaagtggtatcatcctaggtaagcttatttcagaacaagtctaatatttcagattctttcttttcgactttatactctgagttattacttactgtaagtggtgtatatgaaacctccatgcattttccagtatggatctgctaatatgcacagtaaatccatgtctttgtttgtttttctattaaaaagcaatcaagaaagataatgtgaaaaagaaaggaatttagaggtagggaaaagatgaatgtcagacatttgaagaactatagtaaaatgataaacactaaatatacttgagaaaactttcttaatatgccaatgaggtaggcctgatctttgaaatagtgaataggaatacaatgcatttcctcagtgatcactgattag

SEQ ID NO: 428 - DNA, 385 bp, Homo sapien
  misc_feature (1)...(385): n = A,T,C or G
acagtggcatgannncagcttactgcagccttgggttccctaggcttatgtgatcctcctacctcagcctcctctttactgggaccacaggtgtgtgccaatacacctgactaattttaatttttatagaggagaagtattgccatgtttcccagtttaaacttgaactccctaggttcaagtgatctacctgccccaaactcccaaagtgctgggactacaggcatgagccactgcacctggcctcaggtattatttctatttctattttctacttccataatttctattatatttttcatcttttacttgatattctatttttttctgattttatttagttanctgtgttcccatttaggntaaatttttaaaattaatgtgt

SEQ ID NO: 429 - DNA, 276 bp, Homo sapien
acttgaaactgcatcataaatgcaacattgtcatatgtgaaaacgacaccctaagtccttctttttaaaaatgacattgcgtttagcttattgtaagaggttgaacttttgtattttgtaactatctttaagctcttcagtttataattcatataaaatgccttttgtatttaaaataatcctattttaatcagtgcatgaaatttgcttttttaaagttcatttgaatgattattccttccctctaaagaaatgattttggtaatgttgagaggt

SEQ ID NO: 430 - DNA, 225 bp, Homo sapien
acaataaaaatggatcccaacactggacggtcaagagggtttgggtttatcctgttcaaagatgcagccagtgtggagaaggtcctagaccagaaggagcacaggctggatggccgtgtcattgaccctaaaaaggccatggctatgaagaaggacccggtgaagaaaatcttcgttgggggtctgaatcctgaagccactgaggaaaagatcagggagtacctg

SEQ ID NO: 431 - DNA, 483 bp, Homo sapien
  misc_feature (1)...(483): n = A,T,C or G
acctgtgggtttatnacctatgggtttatatcctcaaatacgacattctagtcaaagtcttggtaatataaccaatgttttcaaatgtattctgtcatacaaagagcagatttttattgaacttgtgcaataactatattaccatacaatataaatattcatgaatagtttcccaagtctggagcgaccacatagggagaaaatgtaaatgtctcaatttttgttcacaaaagtatattttatcaaattgctgtaagctgtggatagcttaaaagaaaaaaagtttcctgaaatctgggaaacaagacatttaaagaatcagcaaaatttcaaataaaaaattatgaaaatattatcctcattagttcatttagtcccatgaaattaattattttctctgcttgatcttggtggacagtttcatgaagctgtcagttagttcattaaagttttggaaattctcagacagtgcaggtggtatca

SEQ ID NO: 432 - DNA, 325 bp, Homo sapien
  misc_feature (1)...(325): n = A,T,C or G
acaagccaggtaatnncgaggcctccaggattgctttgttgttaatgttgctttggctaaatgggctgttttattcttccatatgacttttagaatggttttctttttctaattccataaaaagttgcatttatagtttgagagaaatagcacttaatctgtaagttgctttaggcagcacggacattttaattatattgattctttaaattcatgagcatggagtgcctttttacttatttgcgttgtctctattttttttcagcagttttgtagttcttgttgtagagatattttacctccttgatttaatgtattactaggt

SEQ ID NO: 433 - DNA, 512 bp, Homo sapien
  misc_feature (1)...(512): n = A,T,C or G
caggtacctgtgggtttatnncctatgggtttatatcctcaaatacgacattctagtcaaagtcttggtaatataaccaatgtttccaaatgtattctgtcatacaaagagcagatttttattgaacttgtgcaataactatattaccatacaatataaatattcatgaatagtttcccaagtctggagcgaccacatagggagaaaatgtaaatgtctcaatttttgttcacaaaagtatattttatcaaattgctgtaagctgtggatagcttaaaagaaaaaaagtttcctgaaatctgggaaacaagacatttaaagaatcagcaaaatttcaaataaaaaattatgaaaatattatcctcattagttcatttagtcccatgaaattaattattttctctgcttgatcttggtggacagtttcatgaagctgtcagtttagttcattaaagttttggaaattctcagacagtgcagtggtatcagaaacttgtattcaagagtacctc

SEQ ID NO: 434 - DNA, 467 bp, Homo sapien
acattggaagcttttgtttataggaacttgtagggctcattttggtttcattgaaacagtatctaattataaattagctgtagatatcaggtgcttctgatgaagtgaaaatgtatatctgactagtgggaaacttcatgggtttcctcatctgtcatgtcgatgattatatatggatacatttacaaaaataaaaagcgggaattttcccttcgcttgaatattatccctgtatattgcatgaatgagagatttcccatatttccatcagagtaataaatatacttgctttaattcttaagcataagtaaacatgatataaaaatatatgctgaattacttgtgaagaatgcatttaaagctattttaaatgtgtttttatttgtaagacattacttattaagaaattggttattatgcttactgttctaatctggtggtaaaggtattcttaagaatttgcatgt

SEQ ID NO: 435 - DNA, 379 bp, Homo sapien
acgaggtggctcgactgctcaacctcaccgagaggcaggtcaagatctggttccagaaccgcaggatgaaaatgaagaaaatcaacaaagaccgagcaaaagacgagtgatgccatttgggcttatttagaaaaaagggtaagctagagagaaaaagaaagaactgtccgtcccccttccgccttctcccttttctcacccccaccccagcctccaccatccccgcacaaagcggctctaaacctcaggccacatcttttccaaggcaaaccctgttcaggctggctcgtaggcctgccgctttgatggaggaggtattgtaagctttccattttctataagaaaaaggaaaagtttgaggggggggcattagtgctga

SEQ ID NO: 436 - DNA, 338 bp, Homo sapien
ctgataacggacagaaagagaatgcccacaagtgggtcttctgtggaagatgcatggaggaagaaaggagaaaacagagatcctatcagatgaccttacagacaaagcagaggatcatgaattttctaaaactgaggaactaaaactagaagatgtggatgaggaaattaatgctgaaaatgtggaaagcaagaagaaaactgtgggagatgatgaaagtgttcctacaggttatcacagtaaaacagaaggagcagaaagaaccaatgatgatagctcagctgaaactattgaaaagaaagaaaaagccaacctagaggaacgggccatttgtgagt

SEQ ID NO: 437 - DNA, 529 bp, Homo sapien
actccaacattaccggatctggattggggaggttggtcagggaagagaggggttctacccacagatcaactgtgtaatcttttactattcaagctataattcagcttcaaagtagagtagaaaaaaaattgtcttaactgttctagttcttgatggttttcctccttattaacagttggtatttcttccttggcccttttggactaatgttactgtccaagttctttctcaagaaaccacatctggttcaggagagtgtcaagttggactctttgaactctgttgctgtctgagcaatcgtggtgcctagactttgcattccttgttctgttgacctgcatacatgtgagagctatttctttaagaactatataggctgtgaaaacgcactttctttcccccaaagagctgggaatttatgaagttatggcaatgaactgcagcatgctgggacaattatttgactacttttttttgtaatattgtcaaatgtctctatggattctgacagagatttctttttgttttg

SEQ ID NO: 438 - DNA, 374 bp, Homo sapien
  misc_feature (1)...(374): n = A,T,C or G
ccgggcaggncttggctcctgtggaggcctgctgggaacgggacttctaaaaggaactatgtctggaaggctgtggtccaaggccatttttgctggctataagcggggtctccggaaccaaagggggcacacagctcttcttanaattgaaggtgtttacgcccnntatganacanaatnctatttgggcnngagatgcgcttatgtatataaagcaaagaacaacacagtcactcctggcggcaaaccaaacaaaaccagagtcatctggggaaaagtaactcgggcccatggaaacagtggcatggttcgtgccaaattccgaagcaatcttcctgctaaggccattggacacagaatccgagtgatgctgt

SEQ ID NO: 439 - DNA, 195 bp, Homo sapien
accattggtggccaattgatttgatggtaagggagggatcgttgacctcgtctgttatgtaaaggatgcgtagggatgggagggcgatgaggactagaatgatggcgggcaggatagttcagacggtttctatttcctgagcgtctgagatgttagtattagttagttttgttgtgagtgttaggaaaagggcgt

SEQ ID NO: 440 - DNA, 84 bp, Homo sapien
  misc_feature (1)...(84): n = A,T,C or G
acggaggcctccaganacccancgaagatganaagaanaagctggcagagaanaaggcttccatcggttatacctacgaggaca

SEQ ID NO: 441 - DNA, 211 bp, Homo sapien
  misc_feature (1)...(211): n = A,T,C or G
acacacagacaaggnatggtgatttagttgatcacagcggttcttaaaaatcggacacaaatattggctaaaaataatcccaaacgtttatatatggctttgaaaataattttatctggcttgcggcatgctttcacatgttatctcttaggattttcacaaagccctgtgtggtaggtataatgcccatcttagagatgaaaaaatgggt

SEQ ID NO: 442 - DNA, 468 bp, Homo sapien
ggaatgctcctaaatgatcgcaaagtatttgttggacgatttaagtctcgtaaagaacgagaagctgaacttggagctagggcaaaagaattcaccaatgtttacatcaagaattttggagaagacatggatgatgagcgccttaaggatctctttggcaagtttgggcctgccttaagtgtgaaagtaatgactgatgaaagtggaaaatccaaaggatttggatttgtaagctttgaaaggcatgaagatgcacagaaagctgtggatgagatgaacggaaaggagctcaatggaaaacaaatttatgttggtcgagctcagaaaaaggtggaacggcagacggaacttaagcgcaaatttgaacagatgaaacaagataggatcaccagataccagggtgttaatctttatgtgaaaaatcttgatgatggtattgatgatgaacgtctccggaaagagttttct

SEQ ID NO: 443 - DNA, 502 bp, Homo sapien
  misc_feature (1)...(502): n = A,T,C or G
acctatatctgagacncccnnggacttaattctcagattttgtattgattctgaaaacagaattggaaatagtggagtagaagaaataaaaggtcatcccttttttgaaggtgtcgactgggagcacataagggaaaggccagcagcaatccctatagaaatcaaaagcattgatgatacttcaaattttgatgacttccctgaatctgatattttacaaccagtgccaaataccacagaaccggactacaaatccaaagactgggtttttctcaattatacctataaaaggtttgaagggttgactcaacgtggctctatccccacctacatgaaagctgggaagttatgaatgaagataacattcacccataaccaagagaactcaggtagctgcatcaccaggcttgcttggtgtagataacaatacactgaaatactcctgaagatggtggtgctttattgactncaagaggaaattctacaggattaggatttctaa

SEQ ID NO: 444 - DNA, 473 bp, Homo sapien
acacaaaagggcatagtcctacaaagttgtttatataattgttttatgtgtgcaaattgaaatattaaagatggatcagggatctcagtttaaggaatcctgccttctgtatgatgatgtcttaatttttgagattttcatatattgggttatagctatatatcaggacaggtaaatacattataaaattataacctttataataatttttagtataatcacttgtgtgactataataaattggctttagttttctttactcttcacagttttaataggtaactattttacaagaataacattgctaggtagaaaaatttctgttcagttaggagttcttattttgctgctgaaatgagtcatgcacaattttaaatctctgtagtttcttcataagctattttactatcttactattttataagccttgtgttgcagtcaagtttttaccacattctatagaccttgtctgt

SEQ ID NO: 445 - DNA, 400 bp, Homo sapien
  misc_feature (1)...(400): n = A,T,C or G
tcgtttctttttgagatggagtcttgctctgttgccagactggagtgcagtggtgcgatctgggctcactgcaatctccacctnccgggttcaagcgattctcctgcctcagcctcccgagtaactgggactacaggtgtgcgccaccaagcccagctcatttttgtatttttagtagagatggggtttcacgatgttggctaggatggtctcgatctctggtcanagtcttttctgtaaatatccttggtaaagaagcaatttttagactgtagctgttgcaaatgctttaaggaagaagcanaacaactgtcaagnnttcctgaaatgaagaaactacaccanggctgctatatcagagcaaaccnnaaaccaagcactccaatcatgatgccgacag

SEQ ID NO: 446 - DNA, 530 bp, Homo sapien
actttcatattttaaacagaggatatcggcatttgtttctttctctgaggacaagagaaaaaagccaggttccacagaggacacagagaaggtttgggtgtcctcctggggttctttttgccaactttccccacgttaaaggtgaacattggttctttcatttgctttggaagttttaatctctaacagtggacaaagttaccagtgccttaaactctgttacactttttggaagtgaaaactttgtagtatgataggttattttgatgtaaagatgttctggataccattatatgttccccctgtttcagaggctcagattgtaatatgtaaatggtatgtcattcgctactatgatttaatttgaaatatggtcttttggttatgaatactttgcagcacagctgagaggctgtctgttgtattcattgtggtcatagcacctaacaacattgtagcctcaatcgagtgagacagactagaagttcctagtgatggcttatgatagcaaatgacctcatgtcaaatat

SEQ ID NO: 447 - DNA, 346 bp, Homo sapien
actacagaagagagcgccggttcttgccctgagtctgcttctggcagttgggtccctcatcgggtatagtcgttctccaaatgataagtccatcaatgcccttctgatgactgttacaggattttttattggtggaccttctaatatgattagttctgctatttctgcggacttgggtcgccaggagctcatccaaaggagcagtgaagctttggccactgtcacaggaattgtggatggttcggggagcattggagctgcagtgggccagtatttagtgtctctgatccgggacaagctaggatggatgtgggttttctactttttcattctcatgacaagttgt

SEQ ID NO: 448 - DNA, 581 bp, Homo sapien
  misc_feature (1)...(581): n = A,T,C or G
actggatcttttattcttctacctttttcttcagcagtgtccgtatagattaatctcctgacatttccagaactcatcagcagcttttttgggggagcattttcaaatattccaacattctcaaactctatataatcttcagtgacagctgggttacctggtcctgcctccctgacctgcagacatccttcggctggcctctagggctcgngaaggcaaagctgagttagccagccttgcaacctcaattctcagagaagacccctgttcactccaggctgtgaaacactcacatttaccacacactacatgtcagcagtcggcaggtagcctcataggacctttaattgcagaatatgtaaaataagagtcttggacttaaaatgattctttaccaatctgtgatatgaggaaagcacaataccagtaaaatatattttcaaacaggaaactttatcctttgacaatttattaaagggaagagaagtggtaaaattttatctcaatactgtttatatcatgacatactaattgtttgngcctgatttcaagttttaaatgctatctctctgactcattct

SEQ ID NO: 449 - DNA, 427 bp, Homo sapien
acaactcttaactgtgccagtccccagttcaccagctttgtatccagtcgtcatctcattcaagtatggctttacttggtgacactggccatagctaagttaacttggcatgtttgacttttgacaataacaaaaatggttttggattttgttttatttccaaaaaatgtatacaatatcagaacttcacattttatatactagtatctggctattagtattttacaggaaccatagttcttggtgactacatatatatatatatttttgtgaccttttttgtaaactaagtgccgtttcaacgttacaatcatttttagggttattgtaatcaatgtgaatatcatgttttttcaaatctgttctgagcctatagtgtttgctttgtgaacatgtgtattgtatatattctgtatagttatattgt

SEQ ID NO: 450 - DNA, 506 bp, Homo sapien
  misc_feature (1)...(506): n = A,T,C or G
gagttggcactctacgacttctagatgcagttaagacttgtggccttatcaactctgtgaagttctaccaagcctcaacaagtgaactttatgggaaagtgcaggaaataccccagaaggagaccacccctttctatccccggtcaccctatggggcagcaaaactctatgcctattggattgtggtgaacttccgtgaggcgtataatctctttgcagtgaacggcattctcttcaatcatgagagtcccagaagaggagctaatttcgttactcgaaaaattagccggtcagtagctaagatttaccttggacaactggaatgtttcagtttgggaaatctggatgccaaacgagattggggccatgccaaggactatgtggaggctatgtggttgatgttgcagaatgatgagccggaggacttcgttataagctactggggaggtccatagtgtccgggaatttgtcgagaaaatcattcttgcacattnggaaaaaccatt

SEQ ID NO: 451 - DNA, 322 bp, Homo sapien
acgatgtctagtgatgagtttgctaatacaatgccagtcaggccacctacggtgaaaagaaagatgaatcctagggctcagagcactgcagcagatcatttcatattgcttccgtggagtgtggcgagtcagctaaatactttgacgccggtggggatagcgatgattatggtagcggaggtgaaatatgctcgtgtgtctacgtctattcctactgtaaatatatggtgtgctcacacgataaaccctaggaagccaattgatatcatagctcagaccatacctatgtatccaaatggttctttttttccggagtagtaag

SEQ ID NO: 452 - DNA, 273 bp, Homo sapien
actgttgctttaatatgagcttcaatataagaagcaatctttgaaataaaaaaagatttttttttaattctgggtttgattcttaacattgaaacaaacgttaagtatttctaatgatccatttatatttctaatttaattgtgatcttttaataaccctatttatgatctgttgttgtctgtctgctgcttttattgtttatttaaaatcaaatatgttttacaaatgttttttcagacaagattctgtaacatcatgtaaagcttttttgt

SEQ ID NO: 453 - DNA, 163 bp, Homo sapien
  misc_feature (1)...(163): n = A,T,C or G
gaaacatcantttctgactgaagtggagactacaacaactttagtgtttcccttanaaggattacggccatggtgaacttgactgantaaacaatgctataaataaaaagctcttccaaaacattaaccatggtaagcatcattatccccataaaatggtggc

SEQ ID NO: 454 - DNA, 339 bp, Homo sapien
  misc_feature (1)...(339): n = A,T,C or G
actctggggcttgtnngagggtaaaatagagacccagtaaaattgtaataagcagtgcttgaattatttggtttcggttgttttctattagactatggtggtggtgctagaagaatttgagaagaaatactcctgtattgagttgtatcgtgtggtgtattttttaaaaaatttgatttagcattcatattttccatcttattcccaattaaaagtatgcagattatttgcccaaatcttcttcagattcagcatttgttctttgccagtctcattttcatcttcttccatggttccacagaagctttgtttcttgggcaagcagaaaaattaaattgt

SEQ ID NO: 455 - DNA, 206 bp, Homo sapien
  misc_feature (1)...(206): n = A,T,C or G
acaacaaaataggatgttaatccattaccactgttcttccattcgagaggcagctgatggttaaagcgcccgtaacatacatcgattatttttatcccatgactttattgtatgtttagaaaggtggaacagcannaanaaaaagaggctggacaaaagacgttgatgtttttgttcttcagatgtatgcagagctgattatgagt

SEQ ID NO: 456 - DNA, 488 bp, Homo sapien
  misc_feature (1)...(488): n = A,T,C or G
accactgcnaggccactgtttatacatgaaagcatccatgatgaggttgtaaacagacttaaaaaggcctatgcgcagatccgagttgggaacccatgggaccctaatgttctctatgggccactccacaccaagcaggcagtgagcatgtttcttggagcagtggaagaagcaaagaaagaaggtggcacagtggtctatgggggcaaggttatggatcgccctggaaattatgtagaaccgacaattgtgacaggtcttggccacgatgcgtccattgcacacacagagacttttgctccgattctctatgtctttaaattcaagaatgaagaagaggtctttgcatggaataatgaagtaaaacagggactttcaagtagcatctttaccaaagatctgggcagaatctttcgctggcttggacctaaaggatcagactgtggcattgttaaatgtcaacattccaacaagtggggctgagattg

SEQ ID NO: 457 - DNA, 453 bp, Homo sapien
  misc_feature (1)...(453): n = A,T,C or G
acatttgatnncnttggacattctatcaatgattattcaatatctcctgatgggcagtttattctcttagaatacaactacgtgaagcaatggaggcattcctacacagcttcatatgacatttatgatttaaataaaaggcagctgattacagaagagaggattccaaacaacacacagtgggtcacatggtcaccagtgggtcataaattggcatatgtttggaacaatgacatttatgttaaaattgaaccnnatttaccaagttacanaatcacatggacggggaaagaagatanaatatataatggaataactgactgggtttatgaanaggaagtnttnantgcctactctgctctgtggtgggtctcccaaacggcacttttttagcatatgcccaattttaacgacaacagaaagtcccacttattgaatactcccttctactct

SEQ ID NO: 458 - DNA, 376 bp, Homo sapien
acacttatcatctaaatacctctctcccgtcttctcttttacaacataccatttcaacctgtttgtttaaagaatgaaggccttaaggaaaagccttattcacatccccgtaaaagaaagaaataaatatttgtttctagaatcaatctaactgaacttgactaaatcttgatagaggctccaatcttactcacacataaggcgatggatgatcttttgttgtcaacaaattctcattaagatagctaaacagttaattataattattcaaatgtatttcttgagttcctactatgtgcaaagtatcgttccaaagtagacactcttccttagaaataaagtgggccactgaaatcataacttcaaaagtctagaa

SEQ ID NO: 459 - DNA, 297 bp, Homo sapien
acaaattctttataactgacttagtcatttgccgcttagcagtttatatactgaaatgaaaacatcttgtggggaaaagtgactttagattatgaactcaattcaaatgaactctatttaaaatggggtcctattttggacaaaggaaattaagaatgtaaaagtcagaacagtcttgaggtaaaaagtgtgctttggcttaaaagggatacagtatattaattacatcttttattattattgtttatttcttagaatcatttctggctttctcaaaacaaaataatattaatgagt

SEQ ID NO: 460 - DNA, 454 bp, Homo sapien
actggtcctactattatagaatgtttgcttcataagaacaggcactgactgtatcatctctgaacacaatggaatgaagctggcaataacaaaagaaaaattggaacatttacaaatgtgtggaaattaacagatttctaaacaatcaaggggtcaaagaagaaatcacaagggaaattagaaaatactttgagatgaatgaaaacaaaaacacaaaataccaaaactgagagtgtgtgatgacaacagtgtgcagagggaaattcatagctgcaaatgtccatattaagaaacaagacagtaactatgtgaggtgatgggtgttaattagctcagctgtagcaatcatttcataatgtatatcaaaacatcccactgtatactttatacttttttataaaaataaatattcttacaaaaggacaggcgctgtgtctgtctggctcaccattgt

SEQ ID NO: 461 - DNA, 300 bp, Homo sapien
  misc_feature (1)...(300): n = A,T,C or G
accttcactatatcncactttattgttaattaactgcatttttaaaagtagagattggtcttctcttatgtatacttatatccctctaaatttaaatccatcttgccatgttttgtatttaacttgaagtgatctaattaatgagaaaaagaggtattttaaaattaaggtgcatccaaaagggaagcgtaaggatacagagagatctggaaaccttgccttgagagacgtaatcnaaagaacctaggacacgtgccctgaaaatgagacaaggaagacatgtgagaaccatctgcatgt

SEQ ID NO: 462 - DNA, 472 bp, Homo sapien
acaaatctggggtttggccattaaaagttatttacaacagtgggagaaaaaaagacaagaagttgtttcacattacagacctccccccaccccaaagcctaatacttgcttaccaagtcaaaaaagagacacagttgattcacaggctggaggtttgaacttgagtaagacatttataaaaacctagacggggcagtgtcctccccagcccaggtgccactgggcacagcacaagagactaaaaacaacaggggaaggctggacactcaaggtttgggagtataagcaccccacttctggctcagggatttggggagtagggtaaacaaaacctacttggaaaagaattggggaagaaaaccaacaactgccttatgcaggggtggggacagggaaggaggtagggccagggacaggagcatttcacatcactaacctaacttgggaagctgtaagggaccatcttcaactg

SEQ ID NO: 463 - DNA, 569 bp, Homo sapien
  misc_feature (1)...(569): n = A,T,C or G
ttgcatgttcatgtttaagcagttactgtnacaagaagtttaaagttaattatatcagntnnctaatgcttcatgataggcaactttacccattttgaatgccttaatttaatttttttcaaagtctcagccctgtctgtattaaaaaacaaaaaaagcgtttaccagctcttaggatgtaaactagctttgtggaagataaatcgtgcactatttttacacataaatagttatatcaatgtcagcctattttgattaacaaatgtttttaaagtattattggttatagaaacaataatggatggtgttggaactaatatatccttgatgtctgtctattattcattcaactctttttacagacctcagtattagtctgtgactacaaaatattttatttgctttaaatttgctggctaccctagatgtgtttttattcctggtaaagacatttgtgattacattttcacacttaagattcaanaatttttcccanatataaanaaaactaagacaggctgtagatgcattttaaatattnaaatatgatcctcagacatgcagctgtg

SEQ ID NO: 464 - DNA, 247 bp, Homo sapien
  misc_feature (1)...(247): n = A,T,C or G
acttagantnntataaaccacttcccagagcaggaaaattaaaatgtgaagcagttgttgctgatgtcctagataaaggatccggtgtagtgattattatggatgtctattcttattctgagaaggaacttatatgccacaatcagttctctctctttcttgttggctctggaggctttggtggaaaacggacatcagacaaagtcaaggtagctgtagccatacctaatagacctcctgatgctgt

SEQ ID NO: 465 - DNA, 281 bp, Homo sapien
acccaaatttccaagacacaaacatgacctatccaagcgcattacccacttgtggccaatcagtggccaggccaaccttggctaaatggagcagcgaaatcaacgagaaactggactttttaaaccctcttcagagcaagcgtggaggatgatggagaatcgtgtgatcagtgtgctaaatctctctgcctgtttggactttgtaattatttttttagtagtaattaaagaaaaaagtcctctgtgaggaatattctctattttaaatatttttagtatgt

SEQ ID NO: 466 - DNA, 566 bp, Homo sapien
actcatttatttagcctctcagtgcttaataagacttttctttattttttagttagccgttaggttttgtgaggttagattcctggaagcagtgaatttatacactgttatattaatagagctccgttctttgagtcatgattccaagctaaaggaaattaaaaatgtaatttaataatttcctatttttagggttgttaatttttttctacaaaaaaaccttgaaattttagatatcccaatgtgaatctaatttccatatatacagaaattagacaaataataagtctttagttcaacttaagcatatctcaaatgacttctctaaatttaaagttgatcatgataggatcataaaagacagaaaagacttaagtaatcttgtaatgacaattatttccatttttgctgaactaaaaatatttaacttcataaaatatgttactacagcttccagatttaaagaaaaaaagtttcccccactctcaattaaaagttagaaccctccacttttaaaattatacaaatatttcttttttacattacacagaagccttctgtacctg

SEQ ID NO: 467 - DNA, 543 bp, Homo sapien
acggtagaactgctattattcatcctatgtgggtaattgaggagtatgctaagattttgcgtagctgggtttggtttaatccacctcaactgcctgctatgatggataagattgagagagtgaggagaaggcttacgtttagtgagggagagatttggtatatgattgagatgggggctagtttttgtcatgtgagaagaagcaggccggatgtcagaggggtgccttgggtaacctctgggactcagaagtgaaagggggctattcctagttttattgctatagccattatgattattaatgatgagtattgattggtagtattggttatggttcattgtccggagagtatattgttgaagaggatagctattagaaggattatggatgcggttgcttgcgtgaggaaatacttgatggcagcttctgtggaacgagggtttattttttggttagaactggaataaaggctagcatgtttatttctaggcctactcaggtaaaaaatcagtgcgagcttagcgctgtgatgagtgtgcctgc

SEQ ID NO: 468 - DNA, 195 bp, Homo sapien; identical to SEQ ID NO: 8

SEQ ID NO: 469 - DNA, 362 bp, Homo sapien
gtttgacagtctcattttatcactgcgtttgtatctattactaaaatgtattttttgacctcttactgattcattgttggtatgtaccagctgtagccaaaaagatgctggggcagattgtggacaagtagaagcacctccttcccctctgcgacattgaacggcgtggattcaatagtgagcttggcagtggtgggcgggttccagaaggttagaagtgaggctgtgagcaggagcctctgccaggggatgcaccatctgtggggaggggccgagggagactccatggtctctgctgtctgctctgtcctcctctgtggagaagagcttgagttccaggaacgttttgtcaaggctgctgt

SEQ ID NO: 470 - DNA, 543 bp, Homo sapien
actgccgggtaacgctgtggtttccattgagcctgaactgatgggtgagggcgtcgagtctccaacaagaactgagggtgtagagccgacaggtaagactgttgttgccattgcatctgggctgctgtgggatgcttttgattcctcactacggcctgagattgtggagctatcacggaagtgtgttgtttcagttgagcccaggctgctgtggtagcttgtatgtgctagggcagctgtggtgctaggagttgaagattttgtgtgtgttgtgctgccgtggaaagttgctgattcttcactatggcctgaagttgtggagctttcagggaagtgcattgtttgagttgagcccgggctcctgtggtaggctgtagattcttcaacatggcctgaggtcgcggagcgggcaggtgggggtgttgttgcagttgcaactgggctgctgtggactggtgtcgattcctcactatggcccaaggttgtggagctggcagaaaagtgggtttgttggagttgagctcgggctgctgtgataagttg

SEQ ID NO: 471 - DNA, 575 bp, Homo sapien
  misc_feature (1)...(575): n = A,T,C or G
accattatttggttcctggagttatacactaattttcagtatattactgttaaattaccaacacaaggcaatttatttgaaagattccgtttatcctgccattgctttgaaaagcagcaggaaacgaaatcctttgacttgtatcagcttctgcagagcatctttgttttcctttgtcctttgtttcctaccttttgaatcagattccgttttagtcaggaagacttcttgggaccattcttagtaacctgaaatttcttttttaattgcatgaagtggattgatcatgagcaaatgatgtgcttatttctccctcactgttgaatatctttgaacttgctgttttcaatatgggcagcacaaaggtgagagatacatattaatagtagtatgtattactcttatacattagatacctatatttaaatgaaaggcccaatttgtaaacatatacattcatattctctcttgccccaagttttangaacatgttaggatataggagacttaatttataataatgagagcatttttttattttactaaagccatttttatagtcaactatcttttct

SEQ ID NO: 472 - DNA, 416 bp, Homo sapien
  misc_feature (1)...(416): n = A,T,C or G
actgagacanaacattgtgtctacataagcacaagttgtaacatttcacaacttctaaaaggaatgtcaacaattacaacgatcatgcataccatggtcgataatcacattttagaagcattttcaaccatttctaaagaaatgcttataacattgttatatatagaactactttcaataaactgcaaaacattgatcgacttttccagtatgagctacagtgtcaacacaaaagggaggcataaatgtttaatttatgaaatcagaatggaatatttactgtaaagaaaaattaaaaagctttcaaataaaggccattatcgaaccaacgtgaagagcacaactcgaacttttgagttcattcatcttttaaagctgtcctctcaataacttcagttctaagcactgaattcagt

SEQ ID NO: 473 - DNA, 510 bp, Homo sapien
  misc_feature (1)...(510): n = A,T,C or G
actaggtagtgctgggcacacagtagatgtttgataaatacctgttgatcccatataaataaatacagtagactataattgaaaaggcaataattaggattatttaaaaatagaaaagtattcaagctaagtaattagtgataaagatgggcttgtttcctctgagtttatgatttcagtcagaatcttcaattctgtatgcttaaaaatgaactgatacttatgaagttcaatgtatttctaggatactgaactactacaaactgccaactttatattgtttacatcactcatcaatattgaaaagcataatattatgtgacattgtaaattataatccaatggatcccagctgaacagtcacttatttgaaacaatacaggaaaattatcatctattcctattactaaagttgcatatgttaatcataattctcaattttacatatttgtatttggttacaaactagctaaatgctatcagtgctgncttcctaagttgctgtgtctg

SEQ ID NO: 474 - DNA, 501 bp, Homo sapien; identical to SEQ ID NO: 341

SEQ ID NO: 475 - DNA, 332 bp, Homo sapien
acagttagtgggagcacactatataaatcctttgcatgacaccattcaacaatattttttaaaatctacaaaattttaaagtttcacttccctagcaaaatatcttcagtcaagaaattagtctttgaaaattatgaaaattgttgtgggaaatatttatacaaattattactgataatgcacatatattttgaaacattgtttctagaagcaataaaatataacctatttaggagataacccaaatgatttgtaaaaaaattaacttgtagaaaagggaaggatgttgtgtaaaatcaagtcaattatttgaggtttttataatattgagt

SEQ ID NO: 476 - DNA, 449 bp, Homo sapien
acagcctctcttactgggaagaatcatagcttcctatgacccggataacaaggaggaacgctctatcgcgatttatctaggcataggcttatgccttctctttattgtgaggacactgctcctacacccagccatttttggccttcatcacattggaatgcagatgagaatagctatgtttagtttgatttataagaagactttaaagctgtcaagccgtgttctagataaaataagtattggacaacttgttagtctcctttccaacaacctgaacaaatttgatggaggacttgcattggcacatttcgtgtggatcgctcctttgcaagtggcactcctcatggggctaatctgggagttgttacaggcgtctgccttctgtggacttggtttcctgatagtccttgccctttttcaggctgggctagggagaatgatgatgaagt

SEQ ID NO: 477 - DNA, 183 bp, Homo sapien
  misc_feature (1)...(183): n = A,T,C or G
ctggcctaactcgaangacactacccctgcacctnctactaccacatcagcctttgttaaactatctacaacttatcacagcagcccgagctcaactccaacaacccacttttctgccagctccacaaccttgggccatagtgaggaatcgacaccagtccacagcagcccagttgcaactgc

SEQ ID NO: 478 - DNA, 195 bp, Homo sapien
  misc_feature (1)...(195): n = A,T,C or G
accattggtggccaattgatttgatggtaagggagggatcgttgacctcgtctgttatgtaaaggatgcgtnnggatgggagggcgatgaggactaggatgatggcgggcaggatagttcanacggtttctatttcctgagcgtctgagatgttagtattagttagttttgttgtgagtgttaggaaaagggcgt

SEQ ID NO: 479 - DNA, 488 bp, Homo sapien
  misc_feature (1)...(488): n = A,T,C or G
acctgtgggtttattacctatgggtttatatcctcaaatacgacattctagtcaaagtcttggtaatataaccaatgttttcaaatgtattctgtcatacaaagagcagatttttattgaacttgtgcaataactatattaccatacaatataaatattcatgaatagtttcccaagtctggagcgaccacatagggagaaaatgtaaatgtctcaatttttgttcacaaaagtatattttatcaaattgctgtaagctgtggatagcttaaaagaaaaaaagtttcctgaaatctgggaaacaagacatttaaagaatcagcaaaatttcaaataaaaaattatgaaaatattatcctcnttagttcatttagtcccatgaaattaattattttctctgcttgatcttggtggacagtttcatgaagctgtcagttagttcattaaagttttggaaattctcagacagtgcagtggtatcagaaact

SEQ ID NO: 480 - DNA, 231 bp, Homo sapien
  misc_feature (1)...(231): n = A,T,C or G
ttttttttttttnntttttttttttttatactttgtatagtttattatacaaatgattgatagtaaaatagtgaattttaaagcttcttcctaacctttcattgngaatgaacagtgatgcagggagaagagacattcanaagaaaaatcatgtntgtattattaaactanaagtgataaaatgttcanaatgacaatgtntttaaaaaataataaccttgntggaattgt

SEQ ID NO: 481 - DNA, 450 bp, Homo sapien
  misc_feature (1)...(450): n = A,T,C or G
accattcacatcctcaaaaattcccaactcttagaaattatcatatattggcaagttcatatgattcaacctaatagcttctacctcacaggattattgtgagaattaaatgagaaatgcatgaaatgtttggcacacaggctcatagtaagtgctcaataaatggtggatattattattcttaaatgaatcatgtaattattttctatataataatcaaactcaatcccacttatttgcaacttctgtatcaagttttaagtccaatctatttactggaatacaatgatttagcacacattgatttttcccataaacattcatatgcaatgattgctcactaaaatgcgaaaagggtgaggatacaatatgtgtttttattgtttttggatttggcttctttcacttagcatgttttcgaagttcatctntgttatagcatgtatcagt

SEQ ID NO: 482 - DNA, 476 bp, Homo sapien
acagtatactgaaattccacttaaatactgaaatattctactaaatgacattgttttgtctaaatttcctccagaaaaatctgttagcatttcttaaaagtccctcagatttgagggaaattctaaattaggacagttttctctccaaataaatataaatgatcttgagtatttttgtttaaagaatgacgtgatttttaagcatggtatatagaagtatgggatgaatcttcaatcttccctaaggtttcaataaataataataaatatagtaataatagccaatcagaggggttaaaaaggtatttgggggggctttttttcctagctctatattcacatatactcatataaaccttaccatggggttactttttggttaccatttccccttccccatttttgattaacctgccctaattctcacctttaatatctaacagatacctttatagaattaacaaaacacatacagt

SEQ ID NO: 483 - DNA, 205 bp, Homo sapien
accattggtggccaattgatttgatggtaagggagggatcgttgacctcgtctgttatgtaaaggatgcgtagggatgggagggcgatgaggactaggatgatggcgggcaggatagttcagacggtttctatttcctgagcgtctgagatgttagtattagttagttttgttgtgagtgttaggaaaagggcgtacctcggccg

SEQ ID NO: 484 - DNA, 195 bp, Homo sapien; identical to SEQ ID NO: 8

SEQ ID NO: 485 - DNA, 372 bp, Homo sapien
actagccagtcaattaggatggctctcatgtttccagtgacttcccgacccagtaggtattttggtctgactgcttgctcttcctcaagttgtctcagataagcataaatatctttcacatattcactacaaaggtttggatcagctccatcttctgcatccacatcatttactgcaagaattacatcagagaaagcctgacacaggtcttcttctgcaggggcacatccagatgtttccattgggcttggagaggcagtatcaaccaaaataggctcaggcgaaagtttttcttctttaacaggctcaggttctggctcaggttccggctctggcactggctcagacactggcactggcaccagcataggt

SEQ ID NO: 486 - DNA, 432 bp, Homo sapien
acatttgggagtttttatgagaaacttaaatgttattatctgggcttatatctggcctctgctttctcctttaattgtaaagtaaaagctataaagcagtatttttcttgacaaatggcatatgttttccacttctttgcatgcgtttaagtcagtttatacacaaaatggattttattttttagtttaactgtgtttctccgacagctcacctctccctgaccagccagccatttccttcctgtgctccacgttcttctgtgtgattaaaataagaatattatttttggaaatatgcaactccttttcagagatcaggagggatttatgtagcagctatttttactgcaaaagtaattcactggaaaaaaaatgtaatttgtaagaaagctttatttttatctcagctctatgtaaagttaaagttactgt

SEQ ID NO: 487 - DNA, 399 bp, Homo sapien
cttggccgtccattattttctgaagcagatggttcatcatttcctgggctgttaaacaaagcgaggttaaggttagactcttgggaatcagctagttttcaatcttattagggtgcagaaggaaaactaataagaaaacctcttaatatcattttgtgactgtaaacaattatttattagcaaacaattgatcccagaagggcaaattgtttgagtcagtaatgagctgagaaaagacagagcatatctgtgtatttggaaaaataattgtaacgtaattgcagtgcatttagacaggcatctatttggacctgtttctatctctaaatgaatttttggaaacattaatgaggtttacatatttctctgacatttatatagttcttatgtccattttca

SEQ ID NO: 488 - DNA, 505 bp, Homo sapien
gatggcgattccgggcaggcagtatgggcttattttgccaaagaaaacacagcagttgcaccctgttttgcaaaaaccatcagtgtttgggaatgattctgatgatgatgatgagacctctgtgagtgaaagccttcagagggaagctgctaagaagcaggccatgaaacagaccaaactggaaatccagaaggcccttgcagaagatgctactgtgtatgaatatgacagtatttatgatgaaatgcagaaaaaaaaggaggaaaataatcccaaattgcttttggggaaagacagaaagcccaagtatattcacaacttgctaaaagcagttgagatcagaaaaaaggaacaggaaaaaagaatggaaaagaaaatacagagagaacgagaaatggaaaagggggagtttgatgataaagaagcatttgtgacatctgcatataagaaaaaactgcaagagagagctgaagaagaagaaagagaaaagagggctgctgcactg

SEQ ID NO: 489 - DNA, 297 bp, Homo sapien
actaattcacaggatctttgtaggttttatctgaaagaaggatataaaaacttaaaagtcagagcagggaaaggggagtaataaattattaagaacaaactcagtgagacttgacttcacttatgatacatgggtagaaagagcaaaccagccttcttcattctgtttctcaatctttgctcttggattaagaggtgtgaatctcccacttcctgaggtggcatttagtggagaacaagaattaccagtagccccggaagatcttcttgtatttatcccgctgacgggagagacagt

SEQ ID NO: 490 - DNA, 323 bp, Homo sapien
accgttgcccatgcggggattaatgtgcagagctatgtcccctgaggagcccaccttgaagttgatagcaaagctcttgcctgtgggaggcacatagcccttgatgatgatggttcttcgagctgtgagccctccttgcagcctcccgaaatatggcacaggcgggttgaaggttgggggtccttccatggtagggcaaggtggcatcatcgggggtccctggggccggaggggctggcctccgatgaagttgattgattgaagttgcagatccccatccacttgcaggtgggtgaccatctgtaggggaagccggtgcccgt

SEQ ID NO: 491 - DNA, 174 bp, Homo sapien
  misc_feature (1)...(174): n = A,T,C or G
accattggtggccaattgatttgatggtaagggagggatcgttgacctcgtctgttatgtaaaggatgcgtanggatgggagggcgatgaggactaggatgatggcgggcaggatagttcagacggtttctatttcctgagcgtctgagatgttagtattagttagttttgttg

SEQ ID NO: 492 - DNA, 207 bp, Homo sapien
acatgtcaaatgccttctgtcccagcacagctcccgtggttccattcaccagggcgatgtttaggcctctgcccacattgtttttcacaggactcatgatcatgcggtcttcaaagcacatagtagggcccacgacgttggcggccccactgcagattttaaacgcaaagtagttggctgggcagggcttgatgaggccacacttgt

SEQ ID NO: 493 - DNA, 207 bp, Homo sapien
acaagtgtggcctcatcaagccctgcccagccaactactttgcgtttaaaatctgcagtggggccgccaacgtcgtgggccctactatgtgctttgaagaccgcatgatcatgagtcctgtgaaaaacaatgtgggcagaggcctaaacatcgccctggtgaatggaaccacgggagctgtgctgggacagaaggcatttgacatgt

SEQ ID NO: 494 - DNA, 507 bp, Homo sapien
acagcttagagaaaccactcatgaccgggagatgactaaactgaaacaagagctgcaggctgctggatcgaggaaaaaggttgacaaagccacgatggcccagccgcttgttttcagtaaggtggtggaggcagtggtgcagaccagagaccaaatggtcggcagtcacatggacctggtggacacgtgtgttgggacctccgtggaaacaaacagtgtaggcatctcctgccagcctgaatgtaagaataaagtcgtagggcctgagctgcctatgaattggtggattgttaaggagagggtggaaatgcatgaccgatgtgctgggaggtctgtggaaatgtgtgacaagagtgtgagtgtggaagtcagcgtctgcgaaacaggcagcaacacagaggagtctgtgaatgacctcacactcctcaagacaaacttgaatctcaaagaagtgcggtctatcggttgtggagattgttctgttgacgtgaccgtctgctctccaaa

SEQ ID NO: 495 - DNA, 263 bp, Homo sapien
acatccataataaaagttactattttagtttgctaacaagaatgatttttaacaagggtgatctggtttaaatagctgatttcctatgtttccattattattttaaatatatattgacatttatgtttaaggaaacaacagagctgaaccagtgaagcacatttcatgataagcactaaagagaaaatatgagatcactaaaatccccaaattacttcataagggaaacagtctgagggatattattaaaaatcaatttaagt

SEQ ID NO: 496 - DNA, 444 bp, Homo sapien
acagctaagtgcgggggtggcggtggagggaacgaaaattgaacctgtctgcctgtgctgtgtcgtgtggctttatcagcccgaggaagggcaggtgtattctaatttgcacaaaggtgctgggtagactagtggcagctctcatgtgctgcacataagtggaatcagtatgaatagaagaacttgctgtataaaggaatttcatggcaacaatgctggtaagggcaattagcctcgcttaagttgccttttttacacaccaaaactttttacatgaagggctggtttcacatgaatactatactgaaatctgtgctctcaagatctagcagtgaccagggctgcccggcgggggctctcctggcaagtcaggaaggtttctgttgctaatataacatagaaacacattagtgcactgggcctctctgaggtcagcatatttgt

SEQ ID NO: 497 - DNA, 169 bp, Homo sapien
acccacgtaaagacgttaggtcaaggtgtagcccatgaggtggcaagaaatgggctacattttctaccccagaaaactacgatagcccttatgaaacttaagggtcgaaggtggatttagcagtaaactgagagtagagtgcttagttgaacagggccctgaagcgcgt

SEQ ID NO: 498 - DNA, 266 bp, Homo sapien
acagtttgttttatatctctttactttttttgttactattttatctggccagcgtaatagttttatttagattttttaaaattctgtagattaaagcaaatgacagttattgaactatcacaaaactattaaactgtggtctcggccgttgtcaccatgccggtcgtccggaagattttccgtcgccgccggggcgactcggagtcagaggaagatgagcaggactcagaggaggttcgattaaaactggaagagaccagagaggt

SEQ ID NO: 499 - DNA, 507 bp, Homo sapien
  misc_feature (1)...(507): n = A,T,C or G
actaatatcccttaatggcagaatgtgataatcatggaattaattattgctaaagtagttttcaaataaaaaaagaaaaaagaaaacaaaacaaattaaacttgacacaatctgaccaaacacgtgtcaatttacaatttcaaggttattttacaaaatacctacatttacacaataggctcccggcagcatttccagacaaatgttcttttaatttatcctgacatgctataaatgaataaattacactatttaaaaattatcatcagtaagttttcctttctcatgggtcagagaaaaagaaatgagcgtgcaaagaagattgagaggaagcgcacgcacacagataacttaaagaagcaggaggggctggggagggtcaacaatcactgaacctcacacagtgtgatgctctccaagggtgaaagtcaactgcttatagccatttcaaaagtattttaaagaaaaatgttttgtanggaaaccctttaatgctttcatttttat

SEQ ID NO: 500 - DNA, 252 bp, Homo sapien
actgccaggggacagtgttgcctctgttgagccttggctgctgtgggaagctgtaggttcctgactgaggcctgaggtggtggtgctgtcagggaatgctgttgtgtgcgttgagcctggtcggctgtgggaggtggtggattcttcactgacgcctgagcttgtcgtgctggcaggtgagagtgttgtgtccggtgatctggggctactgtagaaggtggtagatttctcactcaggcctgctgttgtggt

SEQ ID NO: 501 - DNA, 501 bp, Homo sapien
  misc_feature (1)...(501): n = A,T,C or G
acctgtgggtttattacctatgggtttatatcctcaaatacgacattctagtcaaagtcttggtaatataaccaatgttttcaaatgtattctgttatacaaagagcanatttttattgaacttgtgcaataactatattaccatacaatataaatattcatgaatagtttcccaagtctggagcgaccacatagggagaaaatgtaaatgtctcaatttttgttcacaaaagtatattttatcaaattgctgtaagctgtggatagcttaaaagaaaaaaagtttcctgaaatctgggaaacaagacatttaaagaatcagcaaaatttcaaataaaaaattatgaaaatattatcctcattagttcatttagtcccatgaaattaattattttctctgcttgatcttggtggacagtttcatgaagctgtcagttagttcattaaagttttggaaattctcagacagtgcagtggtatcagaaacttgtattcaagagt

SEQ ID NO: 502 - DNA, 424 bp, Homo sapien
  misc_feature (1)...(424): n = A,T,C or G
accctaccttcagtnntctctttgtaagttggtgacttgcatctgtggccttgaatattttattatcacatgtggcataacagtatccacactttttagttctttattttttttttttattttgagcaattctcctgcctcagcctcccaaatagctgggattacaggtgcatgccaccacacccagctaatttttgtatttttagtagagacaggttttcaccatgttagccaggctggtctcaaactcctgacctcagatgatccgcctgccttggcctcccaaagtgctgggattacaggtgtgggagccaccatgcctgacccacacactttttacttgtataagatgatttttggcttggacataaaagccaaanccacccatttgcttttnatccaaagaacatgtatagttttttgt

SEQ ID NO: 503 - DNA, 591 bp, Homo sapien
  misc_feature (1)...(591): n = A,T,C or G
acagtgttgcccttttcagcaaatgccaattccaagttccattaaatcagaagctccatggctccttggcccacgatgttgagtgctgactgtgtgttctactgaaagagtaaaacactgactatccaaagagaaatggatattttgtttttataataaccatatattattgttttcttcttccctttctatgcaagtgtaaattaatgaacagagaggtatttggaaatggtaatacatttgtcacggatttgtataatgtatacagcattgggaaagtgggtgggggctttctaatatgataccgtctttttaataactatgacaaagcttacataagaattagaagaccactttacatttttacattccttctgctgttcatattaaccttgcacaattacttcattttttctttgactcttttaccacaatgttttggttaatttataatttatcagccatatgtttatcagccatataaccaactagatcccaaatagatccatgtatttgttttccgtgatttggccacattaataaattcataaattgcaatcaaatatcttatatntacacacatatagttta

SEQ ID NO: 504 - DNA, 227 bp, Homo sapien
acagaatagagcagccaggcccaatgtggaagggtgggcttggtttcctgacaagccaggttagaccaataatggttgaagaggctgccctgggctcagaatgggcagctggtccttgcctgggagaactttgtggaaggaaaaggtaagattccttaagtccaaggagagaaccaatccagggtcaaatttcttttcattccctggatcacaacacaccagggaag

SEQ ID NO: 505 - DNA, 403 bp, Homo sapien
accgccttatggagtatacgggcaaccatggaatcaacaaggatttggagtagatcaatcaccttctgctgcttggatgggtggatttggtgctcagcctccccaaggacaagctcctccccctgtaatacctcctcctaaccaagccggatatggtatggcaagttaccaaacacagtgagccgggactctaaaaaaaaattgtaattcatgataggcttcgatttcctgtgacactctgaagacatgaaagtagacatcggaaaatgaaaatatttattttaaaaattgaaatgtttggaacctttagcacagatttgctttggtgaaggacacgtgtcttctagttctgcctttttaagtttttgttcatgatggatatgaacatgatttttctttatgt

SEQ ID NO: 506 - DNA, 210 bp, Homo sapien
actcgtaggttcagtaccattggtggccaattgatttgatggtaagggagggatcgttgacctcgtctgttatgtaaaggatgcgtagggatgggagggcgatgaggactaggatgatggcgggcaggatagttcagacggtttctatttcctgagcgtctgagatgttagtattagttagttttgttgtgagtgttaggaaaagggcgt

SEQ ID NO: 507 - DNA, 187 bp, Homo sapien
  misc_feature (1)...(187): n = A,T,C or G
acttcccaccacnnngttgaaagggagagcaaagtcttatggataaaccctcctttcttttggggacacatggctctcacttgagaagctcacctgtgctgaatgtccacatggtcactaaacatgttatccttaaaccccccgtatgcctgagttgaaagggctctctcttattaggttttcatgg

SEQ ID NO: 508 - DNA, 189 bp, Homo sapien
acacaagtgatatttacattttcatatactagtgatatacctgttgcatacttggcaaaataaaactgatagtaagtctataataataaaagaaacaacaattactaagtaaacaattctagatgatggaagagtaacccccatttaagctacagacttagatgtctaaaaatatgtgtcctgatctgt

SEQ ID NO: 509 - DNA, 532 bp, Homo sapien
  misc_feature (1)...(532): n = A,T,C or G
acagtgatagctccccctgggcaatacaatacaagaacagtgggttttgtcaaattggaacaaggaaacagaaccacagaaataaatacattggttaacatcagattagttcatgttacttttttgtaaaagttaaagtanaggggacttctgtattatgctaactcaagtagactggaatctcctgtgttcttttttttttttaaattggttttaattttttttaattggatctatcttcttccttaacatttcagttggagtatgtagcatttagcaccactggctcaatgcgctcgcctaggtgagagtgtgaccaaatcttaaagcattagtgctattatcagttaccaccatttggggcttttatccttcatgggttatgatgttctcctgatgacacatttctctgagttttgnnattccagccaaaganagaccnctncactatttgatggctggctgcatgcagacatttaaagcttttaggngaatacactacaccagggagtatgactactagtatgactat

SEQ ID NO: 510 - DNA, 200 bp, Homo sapien
actgttcctcacggcagtcaagaggcccaggctctgtgggctccagctctgcatttcctggttctggggttggggctgggatgacttcctgtggacttgctgctgggactggaactggaactgttcctcggagggccgaggagtcacctcttgataatcatagtagtctgggttgtcgatctggtcgctatagtgggtgt

SEQ ID NO: 511 - DNA, 276 bp, Homo sapien
acagcaaattctatagtgcttctgagcccagcagggctttacctgcccctggagagttttagccgtcttgtgtttcttgtttacttcacaaccaaatttgtcccctcttctctctgttaagggagagaagtcactttagctggataatacctatgtaacaaactgagcagctgttatttgggcaaaatcaaaggaagaaagagactatggtcttctatttattgtgggaaggaaaacagggtggggcgggtgagtgaaaaggtgaaaatccctggt

SEQ ID NO: 512 - DNA, 227 bp, Homo sapien
acggcagccttcaatgggaaggacttaggttccatgagccacctcacaggttatgaaacagaaagacagcgtcacaacactgctcttctggctgctacagacttactaaaaaggctctattctaccagtgcctccccgcttgtgttgctcaggacgtggggcttgcaggccacaaatgcagtgtctccactcaaagaacagattatggcctttgcaagcaaatgagt

SEQ ID NO: 513 - DNA, 414 bp, Homo sapien
  misc_feature (1)...(414): n = A,T,C or G
acccttgaaaanngaatggaatctccaggagtgagggtttccatggaagccagcactatccttggggacaccactgaccattaacagattaggaagatgtgcccattttacacacagagaagcagcccanagttcagtgccctgcttcagggcagagaccaagttggggagtcaggaactgaaagctgtcttagccagtttgggggtagggtggggtctcaggcctttggcccctgtgactccaagtataaggcatatatgaaggctagtgagctggggttgggatgggatggcanngtgaaaggtcagcatattcctgcctgcaaacccctccccagccttgattgcaggtcagaaggctgcanggggatgtccctatgctggctgngagttcccagcnactcccttgtggtc

SEQ ID NO: 514 - DNA, 440 bp, Homo sapien
actagatgaagcttatatgcttcaattccctgcatcaggtaactaaggtgcacatcagtagttagttatgttctgtcctttattctctgagttttgagttctgcttttctatgcttttcacgtggtatatattaagctaatgaaggcaattaactaagcttttagaactgcaaaaaaaacaacaacaacaacaacagaggcacaggataccattgtgtcagttccttgtgcaatggaccactgacagatattaactaagtgtttagacaaacacacaaagccacactggagagtcagggccagtattaaagctaatctcatatttatagggcatgttacagtttacaaagccatttcacaaaaatgatctcatttgaactatacctcttgtccatccatcaccccaacacacataaacatagctagatcaggatgtgtgt

SEQ ID NO: 515 - DNA, 324 bp, Homo sapien
acatgcagaattgtcaactacagggaatgaaaagttcaaaaagtagatcctacaagatgtaacgaatacttttctaaacatcaagatacagctcagaacacttcaataacaagatttggtctacttaggcatccggcttgacagctaaacactttagaccacaaagttaacatcatgttacatacgtcttacagtgcacgttaccccaatctgtgaaaataaaccaacatgaaactcaaaaagcattactagctctgctttagtgcctaaggtatcacagcatcacttagtagacagaaatcttatcttccccttaaagtagtt

SEQ ID NO: 516 - DNA, 505 bp, Homo sapien
actgccaggtaacgttgttatttcagttgagcctggactgatgcgtgaggttgtagattctccacgacctgaggttgtggagtgggcagatgagggtgttgttccacttgcatctgggctgctgtggaatattgttgatttctcactgtggcccgaagttgtggagctggcagggaagtgtgttgttggagtcgagcctgggctgcggtggtaggttgtagattcttcaacaggggctgttgcggtgctaggaggtgaaggcgtcgtgtgagttgaggctgggtgggtctggaaggtggtagattctccctgaagtccagggcttgtggagctggcaggggacagtgttgtgcgtggtgagccagtgctgctgtggacgcgtgtagatgcttcaacgatgcctgagcttgtggtgctgtcagggaagagtgttgtgtgagtggagcctgggctgctgtggaaggttgtagattcttgaccaaaggataaggctgtggtacctgcc

SEQ ID NO: 517 - DNA, 573 bp, Homo sapien
  misc_feature (1)...(573): n = A,T,C or G
ttgaactgccatgtcctctgaagaaggaaagctcttcgtgggagggctcaactttaacaccgacgagcaggcactggaagaccacttcagcagtttcggacctatctctgaggtggtcgttgtcaaggaccgggagactcagcggtccaggggttttggtttcatcaccttcaccaacccagagcatgcttcagttgccatgagagccatgaacggagagtctctggatggtcgtcagatccgtgtggatcatgcaggcaagtctgctcggggaaccagaggaggtggctttggggcccatgggcgtggtcgcagctactctagaggtggtggggaccagggctatgggagtggcaggtattatgacagtcgacctggagggtatggatatggatatggacgttccagagactataatggcagaaaccagggtggttatgaccgctactcaggaggaaattacagagacaattatgacaanctgaaatgagacatgcacataatatagatacacaaggnaataatttctgatccaggatcgtccttccaaatggctgtatttataaaggtttt

SEQ ID NO: 518 - DNA, 473 bp, Homo sapien; identical to SEQ ID NO: 200

SEQ ID NO: 519 - DNA, 555 bp, Homo sapien
  misc_feature (1)...(555): n = A,T,C or G
acaaattccagtgtgcagaccacaacctcaaaacaaaaaagatctatttctactggatctgcagggagacgggtgccttttcctggttcaacaacctgttgacttccctggaacaggagatgggggaattaggcaaagtgggttttctaaactaccgtctcttcctcaccggatgggacagcaatattgttggtcatgcagcattaaactttgacaaggccactgacatcgtgacaggtctgaaacagaaaacctcctttgggagaccaatttgggacaatgagttttctacaatagctacctcccaccccaagtctgtagtgggagttttcttatgtggccctcggactttggcaaagagcctgcgcaaatgctgtcaccgatattccagtctggatcctagaaaggttcaattctanttnaacaaagaaaatttttgagttataggaataaggacggtaatctgcattttgcctctttgtatctttcagtaatttacttggtctcgtcangtttgagcagtcactttaggataagaatgtgcctctcaagcct

SEQ ID NO: 520 - DNA, 81 bp, Homo sapien
  misc_feature (1)...(81): n = A,T,C or G
aggatcgtggtctnncctgcagcatnnaggcccaccatgaggatgcgcatttcttttttgccaaaaaggcccttgaagagg

SEQ ID NO: 521 - DNA, 576 bp, Homo sapien
  misc_feature (1)...(576): n = A,T,C or G
gagaaatttagtanattctctttgttagaaactagagttttgaacaattttaaagactataaaattgtttttttttttttttttttaaataaactagttacttgcactttacctgctggcttttccatttggtagataacattctgaactccagcagagttttataatccccacgtgcttaaatatactaaatgttctttttccattaaggntaatgttcgtgaagaaattgaagagttttttccaagaatgnggaagataaatcaagataaaagaaggctaatgaaaagtattaaagatcagaaaattaaaattgaatgggggaaaaaattgaacagaagattggtcagatagaagcacttgaatatttttttaaggctattttgaattgtttgaattggggaagaatacacnaagtatgaaaaatgaaaaactcaatgaagaatgaagagaagtngaaagcaagagtgaagtagaattaaaagaatctggaagaatgaatgggtcctaggttaagtaaatgtatggtttatgttccagngtctgtatgatcaagttgtagatgaatttgcatga

SEQ ID NO: 522 - DNA, 305 bp, Homo sapien
  misc_feature (1)...(305): n = A,T,C or G
acaaagtgacatacanttggaaatccatttttgttgtaaagacattgtttttcagacttttcagatcagttagaaaaatgtcattgctttaaaatcatagctattctgtttaagaggaattgaatttaaaaatgagagagtattaaaactcatgtggcagtatcctggtcttaatcaggtattgcagtgttcaaacaaggtatggacacatcaacatattcaccttttggaaggactagtgacttggttaaaaactaatgagtgtttgcnntgtggtgtttctatgcgagncacccattctcaat

SEQ ID NO: 523 - DNA, 286 bp, Homo sapien
  misc_feature (1)...(286): n = A,T,C or G
acctgagatattnnacagctggacctagtttcacaatctgttgtctccagctctgcatatgtctggccagggggcttctaggaagtaggtttcatctatcaaatgtctcctctgacttccttttgaaacttactgctcttctgttttattttgttttgtttgaagctcagagggagatgggcaattgacagggatgcaatccagggtgggatttcttgaggaagttacaaataagcttgttacaacatcaagatagatggaattggaaggatgctaccaggagagt

SEQ ID NO: 524 - DNA, 170 bp, Homo sapien
accaagcacttgtatttccgtatattttgtttcgcgggggagtgagggggaagaacacggatgaaaatgtcagtttttgaagggtccatgcacatccctgacacctcacaccttatctaagtctgaagctggggagaaaggggttcatttagacttcatacatttccagt

SEQ ID NO: 525 - DNA, 557 bp, Homo sapien
  misc_feature (1)...(557): n = A,T,C or G
acagacattttctttgtgggtgccttcaggattatataaaaacctcttaaaatttcaacaatatattttgaagtggtgaaatttaaattcgggctcatgcacaaattatttcttattacatctgtcctcaacttagttattgatgtcactaaacatatctatttatgttatgtatttattaacagatgctcattattatttttagcttttatctttaaattttagagaatagttaaataaaacattttttggtattataataatgctacaggatattttttctataatatttgcatatctttatatctttcctagaaagctacctatttttatatgatagttttgttttttagcatcatatagttttaataggaggactcttctcagcattttttgtatggcacatgtagtgttgatataatttttccacgtttggttatctttagaggtctttgctttttcttcatttttgtagcacagttttgctggttatgttattcttacataggaagctatttttcgcttggcacctcaactatagcacacaatttncttct

SEQ ID NO: 526 - DNA, 476 bp, Homo sapien
acctacaaaggtcacaagacagttgtcactggagagcagatatgggagatccagaaggatcaacttctatacaatccattcttaaaaatgtgcctttcagcaaatggagagcatccaagtttagtgtcatgcaactcatcagatccactccaaaaatggatacttagccaaaatgattaagtgttccttaaaattaagttgaaaaaggaaatattctttctcataaaactgtgactaggcatacactgtagtttttgaaaattatgcaaaagcagctaaatgtaacttattccaagtgcatttttcttatttatatctttatgtagcactactacagaaattctgcaagtttctgtttcaaagcacaataactagtaataccaaagactatttcaaaatgtccagatgtaggggaagagatgtttacagtatgatgaaaataattttccaagtaaagtgatgtttgtgtgttttgt

SEQ ID NO: 527 - DNA, 437 bp, Homo sapien
gctggatgcttacttgaagacgaggacttttctggtgggcgaacgagtgacattggctgacatcacagttgtctgcaccctgttgtggctctataagcaggttctagagccttctttccgccaggcctttcccaataccaaccgctggttcctcacctgcattaaccagccccagttccgggctgtcttgggcgaagtgaaactgtgtgagaagatggcccagcttgatgctaaaaagtttgcagagacccaacctaaaaaggacacaccacggaaagagaagggttcacgggaagagaagcagaagccccaggctgagcggaaggaggagaaaaaggcggctgcccctgctcctgaggaggagatggatgaatgtgagcaggcgctggctgctgagcccaaggccaaggaccccttcgctcacctgccccaagagt

SEQ ID NO: 528 - DNA, 249 bp, Homo sapien
acattaaagattttttccaagtaagttacactctgttaacttcctgctagccatcagcatgagccctactgcctaaacactatttcatttatttatgtttggaaaccccgtaaacatttttgtttgcaatcttgtttcttttgttataagtcaagtttgaatgttacaatacttttattgaaacttttgttaagttttttcttgtaaattttctttacttgtgagtatcatcttgtcctttaatcctgt

SEQ ID NO: 529 - DNA, 504 bp, Homo sapien
acacttctgaaaactgcatattcactttatgtggtttcagaatactgggctcaatactaagaaagacacttcattgagaaattcttaagcttacagaaaacctatactctttgcacattccacataaccctagcaaaatgcagtttcttcatacttctgtcactttttccattggaagatttgcttaggaaaattaattcctatttattcccacaaaatgttggcattgcttgattttacccaatggggaatgtgctttgaatttttggaacacttttacaattaaaaataaagtagggccatttttaatttgtttcatcagaaactatgttaaagagagggttaaatataaatatattttcgtgtgtatttttgggaagatttttgttcaaagcaatagtcaaaatcagatgacctgtccataataattatgtgtcttcatcttctcagaggccccatgctcatatgcacgtgtcattgggatacactcttgggggatttggt

SEQ ID NO: 530 - DNA, 481 bp, Homo sapien
  misc_feature (1)...(481): n = A,T,C or G
acctgtgggtttattacctatgggtttatatcctcaaatacgacattctagtcaaagtcttggtaatataaccaatgttttcaaatgtattctgttatacaaagagcagatttttattgaacttgtgcaataactatattaccatacaatataaatattcatgaatagtttcccaagtctggagcgaccacatagggagaaaatgtaaatgtctcaatttttgttcacaaaagtatattttatcaaattgctgtaagctgtggatagcttaaaagaaaaaaagtttcctgaaatctgggaaacaagacatttaaagaatcagcaaaatttcaaataaaaaattatgaaaatattatcctcattagttcatttagtcccatgaaattaattattttctctgcttgatcttngtggacagtttcatgangctgtcagttagttcattaaagttttggaaanttctcagacagtgcagttggta

SEQ ID NO: 531 - DNA, 210 bp, Homo sapien
tactggtgtttaatgggggaagaatatgaacagctttaaagagctgtgtattgtggttactactattaaaaaataagatctgcacgagtctgactggcctttgggtggcctttgtggacggctcgtagctggaaagtgttgatctgggttttctggcattcttttaagttaaaaagttaacatcgggacatgggtttgatcttttgttgt

SEQ ID NO: 532 - DNA, 234 bp, Homo sapien
  misc_feature (1)...(234): n = A,T,C or G
caggtactgcaatgncnngctacataaaataaaaaaatctttttaagaggaagctcaataatcagaggctgtattgcatttaaggatttaacactggctatatacaaaagggaaagcatttcaatgagaaatacttcacgttaccaagttctctcctttaatatggcaacattcagcagcttatgctactcttttatcctttggttcccagtgacaaacaatgcagtaataatg

SEQ ID NO: 533 - DNA, 411 bp, Homo sapien
  misc_feature (1)...(411): n = A,T,C or G
acctgtgggtcnattacctatgggtttatatcctcaaatacgacattctagtcaaagtcttggtaatataaccaatgttttcaaatgtattctgtcatacaaagagcagatttttattgaacttgtgcaataactatattaccatacaatataaatattcatgaatagtttcccaagtctggagcgaccacatagggagaaaatgtaaatgtctcaatttttgttcacaaaagtatattttatcaaattgctgtaagctgtggatagcttaaaagaaaaaaagtttcctgaaatctgggaaacaagacatttaaagaatcagcaaaatttcaaatnaaaaattatgaaaatattatcctcattagttcatttagtcccatgaaattaattattttctctgcttgatcttgg

SEQ ID NO: 534 - DNA, 418 bp, Homo sapien; identical to SEQ ID NO: 310

SEQ ID NO: 535 - DNA, 220 bp, Homo sapien
acaaaaccataatgatgttcacaggaacttcattacaacaattcactttaaaacattctgcaaatatataacttccttctcctcaattttagaaaataaatttcacatcccaacatataaaacagatacactcctacttctctcaaattagcattttaacatcttccaataacacaccattttcatataaaaatacctttaaaccaaggttcattcctgt

SEQ ID NO: 536 - DNA, 421 bp, Homo sapien
actgctatttttaaaaccaaaaagagacagcgtgacgatgcgtaaagcatttttcttagcctttcctttgtcttgatctgttaatgagaacaaaactgccagactcaaaatactctactattgtgctgaaagaaatacaatttagattgcacaaaatttgaaaatataactcagctgtcttttaaaagagttgtgttgttatctacaagactattagcagtcttttttcagagcaaattttaacagctagttgtgagtggtttaaaatatagaaaattattaaaatcttagtttgaggggttttatagtgggagaaaaaacaggaccaaagtttatgtgccttcttcagtagtcttaattgaccttttcttcctatttgagactaaagtagtatcagtattctggttttcaggaaatatgt

SEQ ID NO: 537 - DNA, 76 bp, Homo sapien
gttttctttatttctttttcagatagtttgttgttagtgtatagaaatgctactgacccttatatcttgattttgt

SEQ ID NO: 538 - DNA, 274 bp, Homo sapien
  misc_feature (1)...(274): n = A,T,C or G
accccagagcctagcaggccgacaagcaaggactctagctcccccagagctctgggcctgccccattcagagtgagcatctagacatggccccatttttcagtgacctgggaagcgaanaagaggaggtggaattttggccaggacttacttctttgacattgggatctggacaggcagaagaagaagaggaaacctcttcagataactctggtcagaccagatattattctccctgcgaagagcatcctgcagnagaccaaccagaatgaagg

SEQ ID NO: 539 - DNA, 349 bp, Homo sapien
  misc_feature (1)...(349): n = A,T,C or G
acaataaataattatttaaaagtcatagctccagtcactactgaaaacataattttggtgataaacataatttgagaaacttaatttctgaatgtttttatagaaaattactgaaagtctattactcatggaagacttttaaagaataaccttttttcctgttttataaattcccattgttatatggtagtatttcagctacacaatattttagcttttagctagacatttatagcttttcatttgttgaaatggtaatcatctgcatgtttttgtcacttatttcaggttagtgattgcctaacacttataagccaaaataatctttgcnaaaattccatacctaaaa

SEQ ID NO: 540 - DNA, 129 bp, Homo sapien
  misc_feature (1)...(129): n = A,T,C or G
accattggnggccaattgatttgatggtaagggagggatcgttgaccntcgtctgttatgtaaaggatgcntanggatgggagggcgatgaggactaggatgatggcgggcaggatagttcanacggtt

SEQ ID NO: 541 - DNA, 220 bp, Homo sapien
acttgaaacagttctgtgtttgttttttttccttagcgtttagaatagccatcattgtcctgcaataggcagagctatcacgtccaggaaaaatgagggagggaaccacagaggcagcgtgagatccaaatacagcattcaaaggtaattggtccagtggtgcctggggagggaggaagggtgatactccagggttagccgtcttcttttgggggtgtgt

SEQ ID NO: 542 - DNA, 482 bp, Homo sapien
acctgtgggtttattacctatgggtttatatcctcaaatacgacattctagtcaaagtcttggtaatataaccaatgttttcaaatgtattctgtcatacaaagagcagatttttattgaacttgtgcaataactatattaccatacaatataaatattcatgaatagtttcccaagtctggagcgaccacatagggagaaaatgtaaatgtctcaatttttgttcacaaaagtatattttatcaaattgctgtaagctgtggatagcttaaaagaaaaaaagtttcctgaaatctgggaaacaagacatttaaagaatcagcaaaaatttcaaataaaaaattatgaaaatattatcctcattagttcatttagtcccatgaaattaattattttctctgcttgatcttggtggacagtttcatgaagctgtcagttagttcattaaaagttttgggaaattctcagacagtgcagtggta

SEQ ID NO: 543 - DNA, 127 bp, Homo sapien
aagaaaaatgcccccgttgttggaagtatacagcggagtcttcagatacactgtgtcctcgatgtgcagaagttgtcagtggaaaatagtattaacagctcactcgagcaagaaccctcctgacagt

SEQ ID NO: 544 - DNA, 448 bp, Homo sapien
actcatccacttttcattttagaaataaacaggcctaagaaacgaaatatcctgcctgaaataatagattggtaaccttcctagtagaaaagtgtcaaaaatccaggatattttgagataagatacaccgatcacatacagaaagaggttttctttttctattttttcccttttttaatcatgtaattatcacaaagacaaaaacagaagctttttttaagtttttttttttttttctttttttgagtcgagggtctcactctgttgcccaggctggagtgcagtggcttgatcatggctcaatgcaaccttgaactcctgagcccaagcaatcctcctgcctctgcctctgcctcctgagtagctgggactataggtcaccaggccagggtaatagagatgggggtatcgctgtgttgcccaagctggtctcacctcaagtgatcct

SEQ ID NO: 545 - DNA, 325 bp, Homo sapien
  misc_feature (1)...(325): n = A,T,C or G
acagcattctggaataaagcaagagtgttcattcacacacacagtagcttcaaaactgttcgatctgtttgttcccatgtagttttctaaagatggaaaaaaaggactttggtcatcaagactactgtggccatattagattactggaacatctaagcatcagtgtgtgaccatgcgaacaaaagacttcggggagtgtctatttttaaaaaggtttatgtgtgtngaggcagttgtaaaagatttactgcagaatcaancccacttttaggcttaggaccaggttctaactatctaaaaatattgactgataacaaaaagtgtt

SEQ ID NO: 546 - DNA, 281 bp, Homo sapien
  misc_feature (1)...(281): n = A,T,C or G
actgcggccgttaaacatgtgtcactgggcaggcagtgcctctaatactggtgatgctagaggtgatgtttttggtaaacaggcggggtaagatttgccgagttccttttactttttttaacctttccttatgagcatgcctgtgttgggttgacagtgagggtaataatgacttgttggttgattgtagatattgggctgttaattgtcagttcagngttttaatctgacgcaggcttatgcggaggagaatgttttcatgttactttatactaacatta

SEQ ID NO: 547 - DNA, 396 bp, Homo sapien
  misc_feature (1)...(396): n = A,T,C or G
gctccatctgcnngactcacccttctatagaagtaaatttgccttgctggagtgttaacttgttgttggagtgctaactcttctttgtggcaccaaaaagttatttccaacacnaagctgcacccttggtggagggaacatctgacgaagttcaatgtttggggaaaacaatatctggaaagattgaagagtcagcaggagaaacacctaggaaaattacaaggcctgtgaaagaaacatctgagaaatttgcatggccacaagaaagacctacaaaggccacatgggaggaaaaagaaacatctgtaaagactgaatgcgtggcnnngagtaacatctaataaaactgaaagtttttggaanaaggaacatctaagatgatcacatgtcctacaa

SEQ ID NO: 548 - DNA, 295 bp, Homo sapien
  misc_feature (1)...(295): n = A,T,C or G
acaattttggataaatagcacatttataagaaccgcaatgaaaactgacttgaaataatgcttgtaatcaggaaagtaatttcatccaccgatttcaaaaccagattcactgagcataaaagtcaatacatatttgaggaataagtctcctaaaattttaagcttcacgtaataatgtttgcatancaaaatatttctgcttcaagcctttaggaattaagatctgatcagnaatttaactaaagggtagnntgttttacaatgaagnactaaaacctgaacaagatgttgcatg

SEQ ID NO: 549 - DNA, 518 bp, Homo sapien
acagattatttgttatgacaataaaacactcaaaataaatggtctttagcatctcaaattccaactgaaatcattttagtattaactcttcttcccaaagcaatgtctcatttcttggctgtgcaggtgatgccatgttatatccaataactagaaaaatcactgtgctgaacttttatgtttagcttccaagtatttttctaatgttttgcatttcaagtggtatcactgttaaatgccatttgttttcagattgtggccttttattattggctgctagatcctggtgtttctatgttcttttttaagcaccaaaaagaagatggggaagaaaagaaggaaaattttctgatataaatatgttgttcaaattatgagtattatttaaaaaagaaaaaggaacataacccaggagtctaagttaaatctaatattgttaatactgaacttgcaggtccaggttggtatacattccacccctctagaagtattttcttacagtagataagctgctcaca

SEQ ID NO: 550 - DNA, 118 bp, Homo sapien
  misc_feature (1)...(118): n = A,T,C or G
ttttttttttttttnctacttaaaaaaganaagttttattagggcaatttcactttatttttccatacagnaaagtcaactactgcagtaataataaaataagcataaaacaaattgc

SEQ ID NO: 551 - DNA, 451 bp, Homo sapien
  misc_feature (1)...(451): n = A,T,C or G
actcttattcagttccttggtgatgctattgttttgccagcgggagcacttcatcaggttcagaattttcacagctgtattcaggtaactgaagattttgtgtctccagaacatcttgtagagtcatttcatttaacacaggaactgagacttttgaaggaagaaatcaattatgatgataaactacaggttaaaaatattttgtatcatgcagtcaaagaaatggtgagagccttgaagatacacgaggatgaagtagacgatatggaagaaaattaagtgtgatccagtttgatatttttaggttgttgaactgggattacttaaccttgaatgatgatatgtatgcacactgactttaagcttcataaaaccatcantgccaagaaatttctctttgtagtaatttacttgttactgacaccacagcagtatagcatatgtcacagct

SEQ ID NO: 552 - DNA, 182 bp, Homo sapien
accgatggaattggcacagtcgctttttgttaaatggatcccaaatatttacaaagccatcagaaccacctgtggcaaatgtattgtggatattgtgaaaagaaatggcattgactgggtaaatctgctcaatattattttcttttagtctgtgacatttgaaggcatacttcttcttctgt

SEQ ID NO: 553 - DNA, 227 bp, Homo sapien
  misc_feature (1)...(227): n = A,T,C or G
ttttttttttttttttttttttttcgctctaaagatactttttatttaaatattttatgatgatacatatacaaatataatcttccaaaaaacaaatgtaaaactaatacaaatcactttttcaggaacaaagaaaatcatttanaaaatgtgattatgctaaaagaggcaggttaggtttccaaggctgctcaaggnggaagcttaanaccaacttttgtttgagt

SEQ ID NO: 554 - DNA, 212 bp, Homo sapien
acagaaaaatggtgatggagacaattgagaaaattatgggtaatttgggagcagcagatattgatcataaacttgaagaacaactgattgatggtattctttatgctttccaagaacagactacagaggactcagtaatgttgaacggctttggcacagtggttaatgctcttggcaaacgagtcaaaccatacttgcctcagatctgtggt

SEQ ID NO: 555 - DNA, 180 bp, Homo sapien
  misc_feature (1)...(180): n = A,T,C or G
acagggaggaatttgaagtanatagaaaccgacctggattactccggtctgaactcagatcacgtaggactttaatcgttgaacaaacnaacctttaatagcggctgcaccatcgggatgtcctgatccaacatcgaggtcgtaaaccctattgttgatatggacntctagaataggatt

SEQ ID NO: 556 - DNA, 376 bp, Homo sapien
acaattaacacaaaatgttctgagggtagtagcttttcatgcactgaagaatgagatcctaacaacattgcacatcttggatacattagaaattttaaaagccatgtgtaatttcagaaaacttaataccgtcatgaaagacattttcaacacaaaatttaggcactctatactttggaatagccataaaatattccaacaagagttaatgcactttgtgattacatctactcaaagataattctcaattaaaatctatacttattaaataacattttaaattagagcccattaaattttgataattactgtgaaatatttgcagcattgtgttgtagttaaataatgctgaactacttctattactgactctagt

SEQ ID NO: 557 - DNA, 195 bp, Homo sapien; identical to SEQ ID NO: 8

SEQ ID NO: 558 - DNA, 195 bp, Homo sapien; identical to SEQ ID NO: 8

SEQ ID NO: 559 - DNA, 135 bp, Homo sapien
  misc_feature (1)...(135): n = A,T,C or G
acaagctttttttttttttttttttttttttttttgntttttttttttttttttttttttttaggaaaactgaatcaaacanattttattcaactttttanatgaggaaaacaaatgatncaaaataagtcataa

SEQ ID NO: 560 - DNA, 386 bp, Homo sapien
ctttctcagaagtttgagaaagaactttccaaagtgagggaatatgtccaattaattagtgtgtatgaaaagaaactgttaaacctaactgtccgaattgacatcatggagaaggataccatttcttacactgaactggacttcgagctgatcaaggtagaagtgaaggagatggaaaaactggtcatacagctgaaggagagttttggtggaagctcagaaattgttgaccagctggaggtggagataagaaatatgactctcttggtagagaagcttgagacactagacaaaaacaatgtccttgccattcgccgagaaatcgtggctctgaagaccaagctgaaagagtgtgaggcctctaaagatcaaaacacccctgtcgt

SEQ ID NO: 561 - DNA, 341 bp, Homo sapien
actggattttaaatctgtatgtatctgtttgatttttttttctaatatttcagttgagctgctgttttcttccatgcaatattgtatactcaattgtgtatagaagaagctggtgagagtgccctcctacataaataagcaattgcagtgttttgcatgcaaaatataaaaaatttaaattgtcctgattctattttgtaaatggagaaacaatcatatctttctaagcggtaatggaggaagactagtgctttgtgcattttgatatatttgagttcattttttccacaatgtcatacttttgacgcagttgggtttctcataagtatcctagttcatgt

SEQ ID NO: 562 - DNA, 347 bp, Homo sapien
acctctgcatacagatatattataaaacacaagcaatgttatttatgaaactgtgatgcagtcttcaacatcaagaaaaaatgacaactataataaaatttacaacacagtttcacagtctaaatgctatgttcctttaagtattttcatatttttaatcatttattaagagaaaattgtgaaaagttaatttggccttatagagagattcaggatagatgtagcctatagatgtgtcattttaataagttgggatacatgtttagtttttccttatattcctgttcagtgaacagatttttcataattctcacttgttaaagtgctgcaaaaattgcattttcagt

SEQ ID NO: 563 - DNA, 92 bp, Homo sapien
acaggactaggaagcagataaggaaaatgattatgagggcgtgatcatgaaaggtgataagctcttctatgataggggaagtagcgtcttgt

SEQ ID NO: 564 - DNA, 253 bp, Homo sapien
  misc_feature (1)...(253): n = A,T,C or G
gttgaggggggggcattagtgctgatagctgtgtgtgttagcttgtatatatatttttaaaaatctacctgttcctgacttaaaacaaaaggaaagaaactacctttttataatgcacaactgttgatggtaggctgtatagtttttagtctgtgtagttaatttaatttgcagtttgtgcggcagattgctctgccaagatacttgaacactgtgttttattgtggtaattatgttttgnngattcaaactt

SEQ ID NO: 565 - DNA, 174 bp, Homo sapien
acctattctttgcagtctcaggaattgttgacatgctcacctatctggtcagccacgttcccttgggggtggacagactggttatggctgtggcagtattcatggaaggtaattttgtggaacggatggagaggaaggagagcctgacaagtcatatttatgaaggatcagagt

SEQ ID NO: 566 - DNA, 195 bp, Homo sapien
accattggtggccaattgatttgatggtaagggagggatcgttgacctcgtctgttatgtaaaggatgcgtagggatgggagggcgatgaggactaggatgatggcgggcaggatagttcagacggtttctatttcctgagcgcctgagatgttagtattagttagttttgttgtgagtgttaggaaaagggcgt

SEQ ID NO: 567 - DNA, 462 bp, Homo sapien
  misc_feature (1)...(462): n = A,T,C or G
accctcttcaagaatcggatggatgtcgttttgaagggcgacaatcttcctcagtatagaggggtgaacattcggagattgctcaacggtagcatcgtggtcaagaacgatgtcatcctggaggcagactacactttagagtatgaggaactgtttgaaaacctggcagagattgtaaaggccaagattatgaatgaaactagaacaactcttcttgatcctgattcctgcagaaaggccatactgtgctatagtgaagaggacactttcgtggattcatcggtgactccgggctttgactttccaggagcaatgcacccagaangctgccgataggatatacccagtttctactatgtggatgtcttggatgggnaagctggcctgtgtgaaacaagttgcaccaaaaggaacgaantcgcaaaatgaactgtnacctgggcacatgtcagctgcaacgca

SEQ ID NO: 568 - DNA, 412 bp, Homo sapien
  misc_feature (1)...(412): n = A,T,C or G
acctgtgggtttattacctatgggtttatatcctcaaatacgacattctagtcaaagtcttggtaatataaccaatgttttcaaatgtattctgtcatacaaagagcagatttttattgaacttgtgcaataactatattaccatacaatataaatattcatgaatagtttcccaagtctggagcgaccacatagggagaaaatgtaaatgtctcaatttttgttcacaaaagtatattttatcaaattgctgtaagctgtggatagcttaaaagaaaaaaagtttcctgaaatctgggaaacaagacatttaaagaatcagcaaaattttcaaataaaaaaattatgaaaatattatcctcattaagttcaatttagncccatgaaattaattattttctctgcttgatct

SEQ ID NO: 569 - DNA, 401 bp, Homo sapien
accacctcaagtgcctccccagctcaatctccttgttacagtaaccagtcagatgacggctcagatacagagatggcttctggttctaacagaacaccagttttttcctttttagatctcacttactggaaaagacagaagatatgttgtgggatcatctataaaggccgttttggggaagtcctcattgacacacatctcttcaagccttgctgcagcaataagaaagcagctgctgagaagccagaggagcaggggccagagcctctgcccatctccactcaggagtggtgactgaggtttttatgtagaaggggaacaaaaaaaaaatatctgaattttgaaaaaccacaaagctacaaaactgaccctcttttttttttgagacggagttttgctct

SEQ ID NO: 570 - DNA, 166 bp, Homo sapien
acatatagacagcaatgttattaggagcattaaattaaaaaactgaacagcctaatttaaatgtggcttgggcctggtagaagtttgaccaaatggaatggaggctgtgagcaatgtgaggattctatttatttatttacgtttgataaaacttactggaactagg

SEQ ID NO: 571 - DNA, 492 bp, Homo sapien
  misc_feature (1)...(492): n = A,T,C or G
actccagcctgggcgacagagcaagactccacctcaaaaaagaaatatttagcaaatattaaaggacaagagggaatatctgtttaaaaaattataatgcacgttagatgaaaagtaataggatgagatggttgttgctgaaatagcacttgctatataaattcaaacattccttttcaaattcagcttctcagaggtttgacttcagatgcttgagcactttcaacattatctttgcctttatccttctttatgcggataaacacaactgctaaaattataccaatcaccagaagggtggtcagcagtataccaactgccatgcccacagtgggtaatcccagntctggtgacctgctggccggaaacaacttccttccacacaactgcagantgtaactngtaaagaaacaatgccttccaagggtggccgacccccatcattgatgcggntcaagacgacatacgccctctcctcaaagtctgtgtgcc

SEQ ID NO: 572 - DNA, 408 bp, Homo sapien
  misc_feature (1)...(408): n = A,T,C or G
acctgtggnttnattacctatgggtttatatcctcaaatacgacattctagtcaaagtcttggtaatataaccaatgttttcaaatgtattctgtcatacaaagagcagatttttattgaacttgcgcaataactatattaccatacaatataaatattcatgaatagtttcccaagtctggagcgaccacatagggagaaaatgtaaatgtctcaatttttgttcacaaaagtatattttatcaaattgctgtaagcntgnggatagccttaaaagaaaaaaagttttcctgaaatctgggaaacaagacattttaaagaatcagcaaaaattttcaaataaaaaaatttatgaaaattattatcctcattagttcatttantnccatgaaatttaattatttttct

SEQ ID NO: 573 - DNA, 195 bp, Homo sapien; identical to SEQ ID NO: 8

SEQ ID NO: 574 - DNA, 322 bp, Homo sapien
gcccgcggagtatacaccatgagcaaagctcaccctcccgagttgaaaaaatttatggacaagaagttatcattgaaattaaatggtggcagacatgtccaaggaatattgcggggatttgatccctttatgaaccttgtgatagatgaatgtgtggagatggcgactagtggacaacagaacaatattggaatggtggtaatacgaggaaatagtatcatcatgttagaagccttggaacgagtataaataatggctgttcagcagagaaacccatgtcctctctccatagggcctgtttttactatgatgtaaaaattag

SEQ ID NO: 575 - DNA, 358 bp, Homo sapien
acaaaaaatggcaggaatagaaattacagaggaaatgacaatggagcaactagaggctatgactggtggagagcagctaaaagctgagggtggttattttggtcagatcagaaacactaaaaaatcctctcagagattaaaggatgctctattggaccatgatcttgcccttcctctctgtctgcttatggctcagcagagaaatggggtaatctttcaggaaggtggagagaaacatttgaaacttgtgggaaagctctatgaccagtgtcatgatgccctggtgcagtttggtgggtttttagcatctaatctgagcacagaagattatataaagcgagtgccttcaattgatgtt

SEQ ID NO: 576 - DNA, 111 bp, Homo sapien
gcgcaagtaggtctacaagacgctacttcccctatcatagaagagcctatcacctttcatgatcacgccctcataatcattttccttatctgcttcctagtcctgtacctg

SEQ ID NO: 577 - DNA, 381 bp, Homo sapien
  misc_feature (1)...(381): n = A,T,C or G
aaccagaatagcatactgtgataatttantggacttagttatttcaaaagatattattccacttccctgctaaatgaaattaatcatcacctttgactttcaagaggngaaaatagcgtgtaataaagcatatcttttantcatcaggcctactgngaaaagcaaatacngactggatatattatatactanctggtattttttgcttcaattggattttatctcttttgntaaaaaaacatgatttcatcttgnaactgaactgcacatntnatatcagagaaaatcttctaatggcatgacttgtaaaatctctaccccaacaaattagtttgataatctaggagttacctttatctgaaacataatgagttatgttct

SEQ ID NO: 578 - DNA, 415 bp, Homo sapien
acaaagcagcaactgcaatactcaaggttaaaacattagaaaagcatttgtgtgacaggtatattacagtattatcaaaatattacattttcagacttacttagcagataatcatccaccagagcttaaatctttaaattatttccatagtcttaaaaaatatgtaatgtcagaatgcatataaaaagaatgtaaaaggaaacctaaaatacaaatggaataatgtaacaaataaatatttgatttcagtaactgttaataatcagctcaacaccaccattctctctaaactcaatttaattcttataggaataatgaactgtcaaatgccatggcataattatttatttccaagctatcatcaatgattagaaactaaaaaaaatttggcataaaaaaaatcacaattcagcat

SEQ ID NO: 579 - DNA, 556 bp, Homo sapien
  misc_feature (1)...(556): n = A,T,C or G
acaatcttaaaaatttgctgattcatagtttgtaaaacaaaaaccttacaaaactcatcaaaactcgcaaactgatcagaaaagtttctcggaagactagaaaaaatactttattgtcttaatcatgcattacacaaacaaaatctttagttacaccataaaattaagcacatctaaaaaaataaaacagggataactagtcaaaacacagcagatttctgtatcctgattcaactatttttgtatcctatttgtaatgcaaataaaactttactccaaatatttttaaacaagttagttttgtttggaatcatggtaaaccaagatatatatcttagggggaaaccaccttggtttgtaatttaaactataaaatactccatttttagtctattttagactattcaaagagttccaaaatagatatacaggttccttttaggcacattaataaaaggatataaagaccaacaaaaaagtggaatnaataataggccattaagcaaagatggataatccttgataaataaacttgtaaatacagtaagatgtacct

SEQ ID NO: 580 - DNA, 242 bp, Homo sapien
  misc_feature (1)...(242): n = A,T,C or G
accaagcanggaatcgcagggaaatcattcgttttcggggcatatggaacaggtagacagtgtcaaggacttggtccttgggcacctggcaaggataaaagagggggagacttaaggtaggggacctataattccccattctctaaaggcacaatgtataccctgaggggcccactctcacaagaagactcttaaaagagccctgccaaaccatcaggttgatgacccggaagtccttctgc

SEQ ID NO: 581 - DNA, 352 bp, Homo sapien
ttttattattttacagttgttcaggaaacttcccaggatgttgtaaccaagatttaatcaccacagtagatttagagcagatcagtcagcccacttgtcttctctcttctttagggagaggctaggcagtgaacacatcacgtatgcaatgagaaaataaccaactggtaggatgggggaggggaggggaggcagggaataggcacaaatggaattctatcctggctgtccttctcaggtctatctatatttaattttgtcttctctatattctccttccattgccacagagggcagagacaatggggctgagaaactgtaataactgtcactaacagcaaagtagcttagt

SEQ ID NO: 582 - DNA, 432 bp, Homo sapien
  misc_feature (1)...(432): n = A,T,C or G
acctagactcanatacagagaaggaactgcaagcactttatgcactacaagcatcgatagtaaaacttgatcaacctgccaatttgctgcggatgttttttgattgtctatatgacgaggaggtgatctccgaggatgccttctacaaatgggagagcagcaaggaccctgcagagcagaatgggaagggcgtggctctgaaatccgtcacggcattcttcacgtggctgcgggaagcagaagaggagtctgaggataactaaaacttcaaatacacaaaatgaaacaaaagaaacaatttaagtatttttttaaaaagtttcacgtcttcgccaatcacagtgcagcaaggccaattctcgcagaaacccccacgtgtgcacgagtgggagaggggaaagagaaaaaaaggtgatcatggaggaaaaaggt

SEQ ID NO: 583 - DNA, 307 bp, Homo sapien
  misc_feature (1)...(307): n = A,T,C or G
cggcctgggtgctggcgaagcggangccggagttaatacacgaggaactcatgcaaaggaggggactttnngaaatccaaacttagagtgccttgtatttagaatccggaaggaaaaggaaatgaaatgtgaagaaactcatgcaccaaactcgaactggtaagaagactgttagaatgccctcggtaacacagaggctgagagatcctgacataaatccttgtttgtcggaatctgatgcttccaccagatgtctggatgaaaataactatgacagggaaaggtgttccacttactttcttgaggt

SEQ ID NO: 584 - DNA, 171 bp, Homo sapien
  misc_feature (1)...(171): n = A,T,C or G
cttttttttttttttttttttttttttgatttttttttttttttttttttttttttaanacaaatttaaaacaaacttaactttatttcctcactttcacttaaaacttgattttataaaacacatgaaaaaacatttttaaaagttctgtntcacanaacattaaacagt

SEQ ID NO: 585 - DNA, 414 bp, Homo sapien
  misc_feature (1)...(414): n = A,T,C or G
acaccgactacggcggactaatcttcaactcctacatacttcccccattattcctagaaccattggtggccaattgatttgatggtaagggagggatcgttgacctcgtctgttatgtaaaggatgcgtagggatgggagggcgatgaggactaggatgatggcaggcaggatagttcagacggtttctatttcctgagcgtctgagatgttagtattagttagttttgttgtgagtgttaggaaaagggcatacaggactaggaagcagataaggaaaatgattatgagggcgtgatcatgaaaggtgataagctcttctatgataggggaagtagcgtcttgtanacctacttgcgctgcatgtgccattaagatatataggatttagcctataaatttaactttgacaaag

SEQ ID NO: 586 - DNA, 308 bp, Homo sapien
  misc_feature (1)...(308): n = A,T,C or G
acaattgctctattnngtcactacgaaaaggctggagcttaatgcatnctgggagactcacacatttgcatgaaggacttcctgttaaaaatggaacaagatacattgcagtgtcatttatagatccctaagttatttacttttcattgaattgaaatnnatnttgggtgaatgactggcnngaacacgtntttgaagttnnggctganaagatgagaggaatatttnaatnacatcaacagaacaacttnacttttgggccaaacatttgaaaaacttttttataaaaaattgtttgatattttctt

SEQ ID NO: 587 - DNA, 140 bp, Homo sapien
  misc_feature (1)...(140): n = A,T,C or G
accattggtggccaattgatttgatggtaagggagggatcgttgacctcgtctgttatgtaaaggatgcgnnnggatgggagggcgatgaggactaggatgatggcggnnaggatagttcanacggtttctatttcctga

SEQ ID NO: 588 - DNA, 236 bp, Homo sapien
accaactagaagtgggtcatagatagattaccagggatgcagtggtgtttaggcaggataggtctttactggccctgactgctgttaataattggcagcagtgctccccagatcccagaaggtccctgctggagtgtttccagtgcacctgtagggaaccaactagacttctctcctggttagtccagctctttactctaaaccctttctgtccaaaatgagtcattttcagttgt

SEQ ID NO: 589 - DNA, 336 bp, Homo sapien
acaccacctccaaaaataaaaaatggaaaacacacctttagtgaagtagaagtatttgagtatcttgatgcagtaacttatagttgtgatcctgcacctggaccagatccattttcacttattggagagagcacgatttattgtggtgacaattcagtgtggagtcgtgctgctccagagtgtaaagtggtcaaatgtcgatttccagtagtcgaaaatggaaaacagatatcaggatttggaaaaaaattttactacaaagcaacagttatgtttgaatgcgataagggtttttacctcgatggcagcgacacaattgtctgtgacagtaacagt

SEQ ID NO: 590 - DNA, 403 bp, Homo sapien
acctgtgggtttattacctatgggtttatatcctcaaatacgacattctagtcaaagtcttggtaatataaccaatgttttcaaatgtattctgtcatacaaagagcagatttttattgaacttgtgcaataactatattaccatacaatataaatattcatgaatagtttcccaagtctggagcgaccacatagggagaaaatgtaaatgtctcaatttttgttcacaaaagtatattttatcaaattgctgtaagctgtggatagcttaaaagaaaaaaagtttcctgaaatctgggaaacaagacatttaaagaatcagcaaaatttcaaataaaaaattatgaaaaatattatcctcattagttcatttagtcccatgaaattaattattttctctgct

SEQ ID NO: 591 - DNA, 447 bp, Homo sapien
acacctttgactacagctgcagaagtgttcctttagacaaagttgtgacccattttactctggataagggcagaaacggttcacattccattatttgtaaagttacctgctgttagctttcattatttttgctacactcattttatttgtatttaaatgttttaggcaacctaagaacaaatgtaaaagtaaagatgcaggaaaaatgaattgcttggtattcattacttcatgtatatcaagcacagcagtaaaacaaaaacccatgtatttaacttttttttaggattttgcttttgtgattttttttttttgatacttgcctaacatgcatgtgctgtaaaaatagttaacagggaaataacttgagatgatggctagctttgtttaatgtcttatgaaatttttcatgaacaatccaagcataattgttaagaacacgtgtat

SEQ ID NO: 592 - DNA, 453 bp, Homo sapien
  misc_feature (1)...(453): n = A,T,C or G
acaaagcancaactgcaatactcaaggttaaaacattnnaaaagcatttgtgtgacaggtatattacagtattatcaaaatattacattttcagacttacttagcagataatcatccaccagagcttaaatctttaaattatttccatagtcttaaaaaatatgtaatgtcagaatgcatataaaaagaatgtaaaaggaaacctaaaatacaaatggaataatgtaacaaataaatatttgatttcagtaactgttaataatcagctcaacaccaccattctctctaaactcaatttaattcttataggaataatgaactgtcaaatgccatggcataattatttattttccaagctatcatcaatgattagaactaaaaaaaattttggcataaaaaaaatcacaattcnncataaataaagctattttttagcttcaacactagctagca

SEQ ID NO: 593 - DNA, 323 bp, Homo sapien
acagcattctggaataaagcaagagtgttcattcacacacacagtagcttcaaaactgttcgatctgtttgttcccatgtagttttctaaagatggaaaaaaaggactttggtcatcaagactactgtggccatattagattactggaacatctaagcatcagtgtgtgaccatgcgaacaaaagacttcggggagtgtctatttttaaaaaggtttatgtgtgtcgaggcagttgtaaaagatttactgcagaatcaagcccacttttaggcttaggaccaggttctaactatctaaaaatattgactgataacaaaaagtg

SEQ ID NO: 594 - DNA, 416 bp, Homo sapien
actctaggtctgttgattacttaaagtagctaaaatggaaatacattgctggaaaagaaagttaattccttagccttaataaaacctttttatatttactgacctttaatatgaaatcagatacctttccttagctggtttaaatctaggtcctcttttggactattgtttcaggttgaatttccctgaaagcagacactctgaaatggaaatctgagcacagcaaatttactagggaggcctcttgggaccaatgccatgtaaaggaagaaagccagatttccatgggagaagttggactgtgatacagtttcaataacccacacggagagctctgaaagctgggatggtccctcagagttgtctcaagttggggttgagaggagctggacgtttatatccccaatcattagatg

SEQ ID NO: 595 - DNA, 357 bp, Homo sapien
acacattgaaattggacccgatggcagagttaccggtgaggcagatgttgaatttgctactcatgaagatgctgtggcagctatggcaaaagacaaagctaatatgcaacacagatatgtggagctcttcttaaattctactgcaggaacaagtgggggtgcttacgatcacagctatgtagaactttttttgaattctacagcaggggcaagtggtggcgcttatggtagccaaatgatgggagggatgggcttatccaaccagtctagttatggaggtcctgctagccagcagctgagtggtggttatggaggtggttatggtggttcagagcagtatgagtggatatgaccaag

SEQ ID NO: 596 - DNA, 462 bp, Homo sapien
  misc_feature (1)...(462): n = A,T,C or G
acacttttgttacagttacatatatgaatagttagcagaggagaaactcctccgttgttcctacaccaagggaaaaaatgtaaggactgtatagctcatgaataatattaacatttttctatcacaaaatattgataaaattggaattgtatcaattcatgttatggagcttaacattttagccgaaatattaagataatataaataaggcttttancttcatatcaagacctatttgaacacttctagaaaagaacattaaaagttttttcctcatttatggtttgatttagtgtagttgcctcaactgttcttaatggtgtcttagtataatgcataattatttagaatataattataaggcatttacagaatttttatgtggatacttgcaaagatattttcagtccaaaacttnaaattacacacccaaatatgttttgttgccttaatctatacttg

SEQ ID NO: 597 - DNA, 329 bp, Homo sapien
  misc_feature (1)...(329): n = A,T,C or G
acagacctaacnaactgttagattctccaccatcacttanggtttgcccagaagcaacaccagagaattacagacaacgcgcttttgctgaactgtccattttggtggttgtgtttttcagtcaaatataagcaggatgggcgatagagatatatttatatatagatacatattctatatatctaatgcctaaatatgggtattaaagggaaaatttttaaagtctgattaaatccaatatgacatgaaattaaatatatggattagtaaggaaaaatgttaaaaagtnnngaggataccaagaagattaaactggactagccttattt

SEQ ID NO: 598 - DNA, 288 bp, Homo sapien
acaattacccaccactggatttgactcagagaggacccccagagggtgtctccatcttccctatttattttcagcccttgagggcttcattgtagatcaaagccaaggcccccaggaaggtgacatactcctggaagttcacctcctggtccttgttccggtccaagtcttccatcagccttgcaatttcagcatcctgcagcttcgagccaatggtgagctccttctggatcagctccttcagctccttcttgctcagggtgtgcttgtcaccctccctgccggagt

SEQ ID NO: 599 - DNA, 411 bp, Homo sapien
  misc_feature (1)...(411): n = A,T,C or G
acagtgagtccctggcccggtatggcaagagcccatatttatacccgctctacggcttgggcgagctgccccagggttttgcaagattgagtgccatctatggggggacatatatgctgaacaaacctgtggatgacatcatcatggagaacggcaaggtggtgggcgtgaagtctgagggagaggtggcccgccgcaagcagctgatctgtgaccccagntacatnccggaccgtgtgcggaaggctggccaggttatccgcatcatctgtatccttagccaccccatcaagaacaccaacgacgccaactcctgccaaataatcatcccccagaaccaggtcaacaggaagtcagacatctacgtgtgcatgatctcctatgcacacaacgtggcggcccagggcaagt

SEQ ID NO: 600 - DNA, 532 bp, Homo sapien
accatatgggagagagaaagaacctagaaatgggtgtatacatgccattttggtccttctgtgactccttagctatgtgacagttggctaagaagaggggagaccttggagaaagaaactgctgggatacagaaagcagaagagatcatcagggactgaaaacttcctggaaagctactagagttcagatccagccaaatggggaaatgttggcaaacaactgagaaactcagttggaactctaaaaattctcttaggagagatgcagtatcccaggagtgaggcatatgttctaagaggaaaataaaatataattaccataacacagcttaaaactaggtcttgagagcagcaagatgatctgcaagtaattacaaattctgcccagaaaaaaaattcaaaattcttgagtagttctatatcatattatccataaattcagcatactttaaaaaaaataccaaatatacaaaaaagcaagtaaaacagactgataagaaataaatcagttattaaaaacaaactcatagat

SEQ ID NO: 601 - DNA, 211 bp, Homo sapien
acaggtgccgcgctgtggaagcaactcgcgtgtagaaccagttctcatcgtagggagcaagctctttgtgcttggccagcttgacggtatccacccattcggggactttcagcttcccggactttttgaggaaggctgccagagctctgacgaactcctgctggttcacgtcttttacagtaactccaggcatcgtgcggcctccgcgctg

SEQ ID NO: 602 - DNA, 546 bp, Homo sapien
acatggacattctgcaaacccagctgtcacatttttcttgcaactccttttgcaaaagcagactaaaatgttttaaaatgtgaaaaaacattattttttcaaagcaagaaaataatttactgccctcttacataatgtatttataaagtttttccagataaactaatcaaataaattagaataatgtgacaacattacaaatttaatttgttagctgcattccttctgatgttaccacgatagaatgttactgatgattcagggctatttctgaagtctgtatgttgctgctgtccccagtgatggtggacttatctttgccttacctgatcacaaattatgttggggaaaataaagatttaatatttctttaaatagaaaaagaatttggttttgctcgtttaagagcaatgagaaaatgatggaatgttgactgtgtttggcacacaggacacggaccttcatggaagtccttgctctgcgtggcatctgtcagcttttcacctttcattcttattcttcacttttgctgctgagcctagctgt

SEQ ID NO: 603 - DNA, 496 bp, Homo sapien
accctcttcaagaatcggatggatgtcgttttgaagggcgacaatcttcctcagtatagaggggtgaacattcggagattgctcaacggtagcatcgtggtcaagaacgatgtcatcctggaggcagactacactttagagtatgaggaactgtttgaaaacctggcagagattgtaaaggccaagattatgaatgaaactagaacaactcttcttgatcctgattcctgcagaaaggccatactgtgctatagtgaagaggacactttcgtggattcatcggtgactccgggctttgacttccaggagcaatgcacccagaaggctgccgaaggatatacccagttctactatgtggatgtcttggacgggaagctggcctgtgtgaacaagtgcaccaaaggaacgaagtcgcaaatgaactgtaacctgggcacatgtcagctgcaacgcagtggcccccgctgcctgtgcccaaatacgaacacacactggt

SEQ ID NO: 604 - DNA, 587 bp, Homo sapien
  misc_feature (1)...(587): n = A,T,C or G
acaacatgacttaaaacttttttttttctattaaaacttaaaggggaacaaaacttgaaaaagccctgttcttcagaaggtgagtgggttgagggaggcagtaatatgaagtgactgctgtgtattttaactaccagattttttatatttgccactgttaaatagttggaaaggggaaattctgattaagcgaaagtggtatcatcctaggtaagcttatttcanaacaagtctaatatttcagattctttcttttcgactttatactctgagttattacttactgtaagtggtgtatatgaaacctccatgcattttccagtatggatctgctaatatgcacagtaaatccatgtctttgtttgtttttctattaaaaagcaatcaagaaagataatgtgaaaaagaaaggaatttagaggtagggaaaagatgaatgtcagacatttgaagaactatagtaaaatgataaacactaaatatacttgagaaaactttcttaatatgccaatgaggtaggcctgatctttgaaatagtgaataggaatacaatgcatttcctcagtgatcactgattagaatgagtt

SEQ ID NO: 605 - DNA, 411 bp, Homo sapien
acggtagaactgctattattcatcctatgtgggtaattgaggagtatgctaagattttgcgtagctgggtttggtttaatccacctcaactgcctgctatgatggataagattgagagagtgaggagaaggcttacgtttagtgagggagagatttggtatatgattgagatgggggctagtttttgtcatgtgagaagaagcaggccggatgtcagaggggtgccttgggtaacctctgggactcagaagtgaaagggggctattcctagttttattgctatagccattatgattattaatgatgagtattgattggtagtattggttatggttcattgtccggagagtatattgttgaagaggatagctattagaaggattatggatgcggttgcttgcgtgaggaagt

SEQ ID NO: 606 - DNA, 468 bp, Homo sapien
acctggagtataagaagagggtgcccacgggcctgcctttcataaagggggtcaaggtggacctgtgacgggcagtggccccggtgaccttggggcctccgaccctgtgcagcctgggacaaaactgtttccggttggccgctgccacatggattttcttaatcgttttatgtcattagtcactcttctggaatgtcactcaagaccaagcggtcagaaggcctgaggacccaaggccccactggagcagtctgtccttatgccgaatcaaggcggaacatgggtgaaagacgagtaaggggcaaatcacagcaatattccacagcgccctccagagttacctggggaggaccgaggccacacgccactgcccccgaggccagagtgtaagtaaaggataaccaggactcgctgggagagatggactctgtcctcagcaacactccacagcagaaaggggtagcaggt

SEQ ID NO: 607 - DNA, 360 bp, Homo sapien
acttggatgaggaactgatggtcctaagctcaaacagcatgtctctgaccacacgggagccctctcttgccacctgggaagctacctggagtgaagggtccaagtcttcagacagagaaggaacccgagcaggagaagaggagaggagacagccacaagaggaagttgttcatgaggaccaaggaaagaagccgcaggatcagcttgttattgagagagagaggaaatgggagcaacagcttcaggaagagcaagagcaaaagcggcttcaggctgaggctgaggagcagaagcgtcctgcggaggagcagaagcgccaggcagagatagagcgggaaacatcagtcagaatataccagt

SEQ ID NO: 608 - DNA, 265 bp, Homo sapien
actaagagttctagttaaaatctacatgaacttggagaaacctgatttcatcaatgtttgtcagtgcttaattttcttagatgatcctcaggctgtgagtgatatcttagagaaactggtaaaggaagacaacctcctgatggcatatcagatttgttttgatttgtatgaaagtgctagccagcagtttttgtcatctgtaatccagaatcttcgaactgttggcacccctattgcttctgtgcctggatccactaatacgggt

SEQ ID NO: 609 - DNA, 382 bp, Homo sapien
  misc_feature (1)...(382): n = A,T,C or G
acctagtaaaattgatgaaaagagactgactcctagacacatcttggtgaaattttggaattctagtgataaagagaaaataataagggcttctanagagagaagagaaattacctaccaaggaacaagaatcaggttgacagcagacttatcactggacacactggatgctagaagtaaatggagcaatgtcttcaaagttctgctggaaaaagggctttaaatcctagaantcctatatccagcccaaaaatggcattttgattttnagggggtaaaaacaaanggtattttcttagtatttgagaatttagagattatgttttgcatatgcccaccttgagagaattactggggaataatataccttancactctaggg

SEQ ID NO: 610 - DNA, 123 bp, Homo sapien
actgaaagactggcctcacttaaactgagccaggagagctgcagatttattaatgggtgtgttagtgtgcagtgccttgcaggaatttaaactctctacccttaaagaaggaaatgtatttgt

SEQ ID NO: 611 - DNA, 428 bp, Homo sapien
  misc_feature (1)...(428): n = A,T,C or G
accaggtcacagcacacctgcggggacgcagttaacatcgaaggtcatagggcaagatggactgtgctcaggaagcttccttgggcagaagtgtggcagaatgggctggagccagcgaggccagcagcgaggaaagccagggagaaggctcaggtattatattccataataaatagggatcgcatgtgaaaaaaggtaatgctaacatcagtgtcaaagtgagaggtgatcaggaaaggaagtggagttgtggtgatgacagtaaggtgaggatgaccgctagagacaccacagaggatactacagagatactacagaaccccacaactaagagatcatgggagcgggggcagggaggaggagctgtgggacagaacaaaggaacggcagacttggggggagggggcgaaangatgggggaggatgca

SEQ ID NO: 612 - DNA, 286 bp, Homo sapien
  misc_feature (1)...(286): n = A,T,C or G
ttttttttttttttttggctctagagggggtgctatagggtaaatacgggccctatttcaaagatttttaggggaattaattctaggacgatgggcatgaaactgtggtttgctccacagatttcagagcattgaccgtagtatacccccggtcgtgtagcggtgaaagtggtttggtttanacgtccgggaattgcatctgtttttaagcctaatgtggggacagctcatgagtgcaagacgtcttgtgatgtaattattatacgaatgggggcttcaatcggga

SEQ ID NO: 613 - DNA, 324 bp, Homo sapien
actccatctcctgtggggttttcagctggcactcagcacatttgtagaatgacccaggagggctccatggcaactgtgccccgagactccaggcccagccgggtcccgatggcgagagcgttgtggctcagtgaagcactggcacagaaaggctggactcgaggaatcgaggggtgaagatggagtcggctgacattttttgccttaaaaatacattaggagtcataagcgtgatgacacatggagtgtagcttcttgcaccactggatcaacagtcatcaatttcatgactcggataaggtccccaggagcctggcagaatgt

SEQ ID NO: 614 - DNA, 417 bp, Homo sapien
accaggaagaaacatattgccgagtggatgccgccgcgcagcgtgtttgcttgaggcagaagcttcagcatctgctgggataactggaggaagaaatatgaagccttagcggctttacccgggaagcgagtttcgagatggcggctcagcggatccgagcggccaactccaatggcctccctcgctgcaagtcggaggggaccctgattgacctgagcgaagggttttcagagacgagctttaatgacatcaaagtgccttctcccagtgccttgctcgtagacaaccccacacctttcggaaatgcaaaggaagtgattgcgatcaaggactattgccccaccaacttcaccacactgaagttctccaagggcgaccatctctacgtcttggacacatctggcggtgagtggtggt

SEQ ID NO: 615 - DNA, 591 bp, Homo sapien
  misc_feature (1)...(591): n = A,T,C or G
accgtttannatttcatccacatgcccagataatttttttttaatattttgtaaagatggggattccctatattgtccagaatggtcttgaactcctggctttatgcagtctttccacctcagcctcccaaagttctgggttacaggtgtgagccactgcgccgggccaattttggtttttcatggaggacttttagcaggtctcaaaagttttcttctaatagttttcttggtgttctatcattcgtaggtgttgaatttaccaaactttttctatttcaattattacatttttactttgttcaagtaatattgtatcatattaaatgaacattgcattgtgaaaataccctgcttagtcatggtatgtaatcatccttatacctttttgtattctttttttaaatatttctgagaatttctgtgtctaaatttaaataggatgttgttttgtaatcatcttgtgattcttttgtctcctttgggtattattggctaatagatgaattaagaaatgttacctcttctactgcttgaagtttttgtgagaaattgatgttttttcattaangtgttgatgaaatgtacctc

SEQ ID NO: 616 - DNA, 144 bp, Homo sapien
  misc_feature (1)...(144): n = A,T,C or G
tacctatgggtttatatcctcaaatacgacattctagtcaaagtcttggtaatataaccaatgttttcaaatgtattctgntatacaaagagcagatttttattgaacttgtgcaataactatattaccatacaatataaatat

SEQ ID NO: 617 - DNA, 307 bp, Homo sapien
acttttacctgtagactatttttactaaggtgctttataatgtgttttaaagcattgcatttacaaaacaaggaaaatgctgtaaatattgcatattttatgtatttggaccaaaaggttacaagtaattagacaaaagtggttttgcaccaattttatgtcaagtaaaaccatcagacctactgttcttgtatttctcatttaactttactgttaagacatcactgaaatgaacttcagtaagctttcaattttgatacacagttcattattcataacttgaggcagtaattacagtggaatgagt

SEQ ID NO: 618 - DNA, 550 bp, Homo sapien
acacggggcccagactcttgcctggtgccacgtcctccctccagcctgtaatcagaagcccttgtaaaccctcccttgcagtgagggctgaaaactccgatctgcctttgttccatgacaaaggagagattatcacgtgccctactggactgtgcatttcgtggcttgaaaaatcagtggtgaatgatgccactcagacgctgggacactgggagaaccttggttcttggccacagcactgagcttggcgaccagtgaggctgctgctggtgaaacttaacaccataacctctcgttgtcttttgtgaaatcgttccgacttcatggtgttttcttgaagtcattctgccttaaaggaaaaactcattttctttttcaatttaacacaaatattgtggccattttttagaagagttactatttcaaatttcaagggagaagataagactgcatttcccccttaaggaaaaggctaagttaccaaggctgtattaaattgagtatgtgaaagttacctagcaaatccaggatagacagtgacccaatgaat

SEQ ID NO: 619 - DNA, 355 bp, Homo sapien
acataattgattaaaatctcttgattataaatgtttggaaaggttctaaggggacctacagacagacatacatagacatttcaaaattaatagcttttgattagtataatatttcttaatttggataataaaaattgtagctttttattaagccaggaaacatgaagcataatttgtttaaaattctctttggtcattgagggaccaaaaaaggacgtaaaatttacagtcaatctatgagggtttttttccctccataagtttaactttaaaactgtatttaaggaatcaaatcttacaaaatcctggaagattttggtaatgatgttgataatttcagggaaattaatcaagt

SEQ ID NO: 620 - DNA, 484 bp, Homo sapien
  misc_feature (1)...(484): n = A,T,C or G
accttggaacccagtttattcttgtgctaagcagaactgtaaaatagttaaaatgtcttatcaagtaattcgccgattacaaagacaccatttgttttttatttcattctttgttttaactcatgtggtagtgatatttaatactttctgatcaaacaggttcaaagtaaaacgttaaatttcacatttcttttaaagaactcttaaagtgtaacagttacgccatacttcataagtggtaaagaaaggtataaaatttggaaacattttgttgggcatagtagtgattgggtgaaaaggataaattatatcaaaatgagaatgtgctgtaattggaagtagggagctaaaggatgtttctttcagtttagtagaactggaacgttttactattaaacatggcttttataaatgcatggtccaataattttattcactgttagtatttaattcactgncagcttattaatgttttctgtacctc

SEQ ID NO: 621 - DNA, 447 bp, Homo sapien
acacttgtttatggaactttctgtggccacctacgaaagacaagttaacaaactgtcatggaggctgttgttgcccagccagggccgctgcattttgacaacatttccaccctggccactcagcacatttcatggaggtcatgtcttttcactgatacttttttgatagtttttatataacaaaatccttattctatttataacttaagatgataaggcactataaattaatgacctaaaataatatatttgtctgttatcttttgctatttctacttcactttaatttttagctgtaaaattggtaaatggattcttacaactatctctttccatttcttactatttggttttcaaatttcatttaaatgtcagaatttccttttttaggaacaatgtgtatttcattgcactatttaaaaataaactcaaatttgcatgccaaaa

SEQ ID NO: 622 - DNA, 554 bp, Homo sapien
  misc_feature (1)...(554): n = A,T,C or G
actctgaggcttgtaggagggtaaaatagagacccagtaaaattgtaataagcagtgcttgaattatttggtttcggttgttttctattagactatggtgagctcaggtgattgatactcctgatgcgagtaatacggatgtgtttaggagtgggacttctaggggatttagcggggtgatgcctgttgggggccagtgccctcctagttggggggtaggggctaggctggagtggtaaaaggctcagaaaaatcctgcgaagaaaaaaacttctgaggtaataaataggattatcccgtatcgaaggcctttttggacaggtggtgtgtggtggccttggtatgtgctttctcgtgttacatcgcgccatcattggtatatggttagtgtgttggttagcaggcctagtatgaggagcgttatggagtggaagtgaaatcacatggctaggccggaggtaataaataggattatcccgtatcgaangcctttttggacaggtggtgtgtggtggccttggtatgtgctttctcgtgttacatcgcgccatcat

SEQ ID NO: 623 - DNA, 305 bp, Homo sapien
acaacaccgggaatattgccagagttaacctgaccaccaacacgattgctgtgactcaaactctccctaatgctgcctataataaccgcttttcatatgctaatgttgcttggcaagatattgactttgctgtggatgagaatggattgtgggttatttattcaactgaagccagcactggtaacatggtgattagtaaactcaatgacaccacacttcaggtgctaaacacttggtataccaagcagtataaaccatctgcttctaacgccttcatggtatgtggggttctgtatgccacccgt

SEQ ID NO: 624 - DNA, 544 bp, Homo sapien
acaaacccaggcctgggcctaggaaagggcagaagaaaggcaaagggtcccttggagcaggaacccatccctctctgcttatacccagcacccctcatcccaggttcctttcttcaacctccgcctgcctctgggaacacagagcaccaagaactaacaaaccgggaccctccagggccacagcgtggggcagagtccaggcttctgtctccccgcagtgggagatctggggagctcagtgaacctcctcaccctcctgccagtatgaagttgggaagcgccttctctgtcccccagaacagaacaaactcttgttctctgtggttggggaaaaggtgtggggggcttggacctaggaagaagctgagctgaattcctccagggcccaggtgaaacccccaggggagtttctgagactctagacttgccatttctccacttttccttcccaatgactccggtgagcagctcagagtctgggctagggcaactggtaggacagtggggatctgccccagagacatctgtgggtttcagatacctc

SEQ ID NO: 625 - DNA, 619 bp, Homo sapien
acttatatttaatttgatttaatggttactgcccagatattgagaaatggttcaaatattgagtgtgtttcaatatattatctggcttatttcagcatgagtaatatgagcaaaataagttaaaacctgcgtctgatcaattttcctcatgactagaactaaaacagtaaatttggacaatattaagcctcaaataatcatctccaaactccttctaacactttttaaatcagattggaagacatggacaaatcaggttcatgtgttgcatctttatgtcctttgccaatatccaagatcatcacatatggtagatattcacatggagtttcaaattcagaatagattaccattaccttcctgcccttacacatcctactccttatttaaaagttctatttgtgacttttcatttcctgaaagtttaaaaatacaatttgagaatgtttataatacattctctcctgtcttttcacggttacgtctgttattgctgaaatacaccacattttctttgttctggtcaaggttaactcaatatctgtgtgaaagagaactactaacaacgttacaatagaggctagatttgaaaaaaaaatctatagatctaattgataca

SEQ ID NO: 626 - DNA, 195 bp, Homo sapien
accattggtggccaattgatttgatggtaagggagggatcgttgacctcgtctgttatgtaaaggatgcgtagggatgggagggcgatgaggactaggatgatggcgggcaggatagttcagacggtttctatttcctgagcgtccgagatgttagtattagttagttttgttgtgagtgttaggaaaagggcgt

SEQ ID NO: 627 - DNA, 197 bp, Homo sapien
  misc_feature (1)...(197): n = A,T,C or G
accattggtggccaattgatttgatggtaagggagggatcgctgacctcgtctgttatgtaaaggatgcgtagggatgggagggcgatgaggactaggatgatggcgggcaggatagttcanacggtttctatttcctgagcgtctgagatgttagtattagttagttttgtnngngagtgttanngaaaagggcgt

SEQ ID NO: 628 - DNA, 208 bp, Homo sapien
acttttgttttgttttaaattaagagattcccaaatgcctttttccccctcatcttgaaatgagatgagtttttatgtgtaagcaatatttatttaactattctataaaattattgagtgcctactgaggcctttaagcaccgctaacattcctttccatcattcttttaaatgacataaaataattgtgcaatgttcctgatgatgt

SEQ ID NO: 629 - DNA, 207 bp, Homo sapien
actaagtgaagaagtcagaggacagaggaatttctctttctaggagattttcattttgtgtgactcccatggggaggaacagactggcaggaagtacaccggggttaacactggttgacttgaataggattattcgatttttaaaaatacttttccatgttttctgagtgctctatgataaatcagttgcatctgtgataatacagt

SEQ ID NO: 630 - DNA, 442 bp, Homo sapien
accatcacacaggaggagggagctaatccagtaacatacattcaaagattaaattgcagatatgcacagtgtatttggcactgttcattaatattataacaccttcctctcaaagacaggcattcttaagcgttagtcacgatataccagaatttgctattcacattaaaaccaccttttaaactttataacagtaaccgattattatagttttaagaaacaaaacacaatgagaactgggaatggaattcaaatcctccaacttcttgctatgctccaagctgccatccataaaacaggtttaattcggtaatttttccattgtggggagtgtcaacaagaaacaatttaaagacagtattttccaatacaaataaagacacatacttttgtttaaaattaccagttcttcttgggagtgcaaagggagccttgatgatgt

SEQ ID NO: 631 - DNA, 516 bp, Homo sapien
  misc_feature (1)...(516): n = A,T,C or G
accacttaattactggcactgagtatcactgaatttcttagttttctagtggggaaacattattgagaagccctcccttattttaagtaagttgattaaatcttatgtgagttgccagttgtaatttttcaaaggaaaaattttgatggggtggaggaatgaattgccagataatctttctggaattccgagagaattccaaagagggttttttttttttttttttttaggacatcttttgatacctttaaaagaaccactgtcaagtaatccttaaaagaatatcttggaaaaggaaacagattttttcctgtgtgtaagcaataagtgaagttacatttgccctaaccctagggatgattctttacccagttttaaagcccatcatggtattctaaggngttgacaccctccatcctcagagcaggtcgaaaatattaaatagactggggactctatgatgggcagcctgtgctttttgacttcagtttgctatttttctgngatcacattagt

SEQ ID NO: 632 - DNA, 201 bp, Homo sapien
actaaaattttaacctgtgttctaagtagaaactgatttaacccaagtaatgcagctttgattgatttcagcattcgttgctttgctatttttacaaaacagcattgattgaagcaagtcttggttttactaaggtagggtagcatttgctattggtaaagagaataaatacacttaatttcacaatacattgttatatgt

SEQ ID NO: 633 - DNA, 536 bp, Homo sapien
ataaaaccattttctgtaatcaaatgattggtgtcattttcccatttgccaatgtagtctcacttaaaaaaaaaaaaagaaaaagaaatggataatttcatctactgcctttacttggggttaatgtgattcttaaacaccttcatcatggaactctcagagtggggtccgttttggtttcctggtggtgggttttgaaagataagggaaagcacattttgagcatgtctgggtaccatggtgcggatgcttgggaaccagaactgtttcagaggaatctgaagtctgattttagttttcagagacacagcttgttgtaaaacatgagaagacatgatttctaggactcaagcagcaagccaggattctaggttggccgctgtgtcatccttgaagtcaagacaaagctgggctcgaccttcaagggtcctcgttttgataatacttcagaatagggaactcatgtgaatactactatgtagaaataaaacctagaccttgagcgaacatctgtatattggttgaaaacgatagtg

SEQ ID NO: 634 - DNA, 91 bp, Homo sapien
acaggactaggaagcagataaggaaaatgattatgagggcgtgatcatgaaaggtgataagctcttctatgataggggaagtagcgtcttg

SEQ ID NO: 635 - DNA, 235 bp, Homo sapien
accttgttgaaaccccggccgtgtagaacaggcctggccctctgccagggtaatatgggagacagacgtcctcggtgagcttggttgtaaaggcatctgctgcagctcaggaagcaatgaagagccgagacccaaggcctcatccacttccaggagggctccctttatgggctcttggcgactgtaacactgtttagcacagaaactagcacagaaatattacagatgatttggt

SEQ ID NO: 636 - DNA, 249 bp, Homo sapien
acaggctgtcaaccaaagaggtcggagtccccggtctccctcaggccatcctcatgtcagaaggcctcgttctagatcaagggacagtggagacgaaaatgaaccaattcaggagcgattcttcagacctcacttcttgcaggctcctggagatctgactgttcaagaaggaaaactctgcagaatggactgcaaagtcagtgggttaccaaccccagatctaagctggcaactagatggaaagcccgt

SEQ ID NO: 637 - DNA, 288 bp, Homo sapien
  misc_feature (1)...(288): n = A,T,C or G
ttttttttttttttttggctctagagggggtgctatagggtaaatacgggccctatttcaaagatttttaggggaattaattctaggacgatgggcatgaaactgtggtttgctccacagatttcagagcattgaccgtagtatacccccggtcgtgtagcggtgaaagtggtttggtttanacgtccgggaattgcatctgtttttaagcctaatgtggggacagctcatgagtgcaagacgtcttgtgatgtaattattatacgaatgggggcttcaatcgggagt

SEQ ID NO: 638 - DNA, 629 bp, Homo sapien
cgagcggccgcccggcaggtacaatttaatttttctgcttgcccaagaaacaaagcttctgtggaaccatggaagaagatgaaaatgagactggcaaagaacaaatgctgaatctgaagaagatttgggcaaataatctgcatacttttaattgggaataagatggaaaatatgaatgctaaatcaaattttttaaaaaatacaccacacgatacaactcaatacaggagtatttcttctcaaattcttctagcaccatcaacattcttcaagtatctgaaatactattaattagcacctttgtattatgaacaaaacaaaacaaggacctcagttcatctctgtctaggtcagcacctaacaatgtggatcacactcatgggaaagtgttttgaggtagtttaaacctttggaagtttgggttttaaacttccctctgtggaagatattcaaaagccacaagtggtgcaaatgtttatggtttttatttttcaatttttattttggttttcttacaaaggttgacattttccataacaggtgtaagagtgttgaaaaaaaaattcaaatttttgggggagcgggggaaggaagttaatgaaactgtattgcacaatgctctgatcaat

SEQ ID NO: 639 - DNA, 161 bp, Homo sapien
  misc_feature (1)...(161): n = A,T,C or G
actaagtcacacccagccagtcaataacatgngaaatcaaaataaaataataannncaaagaattacataaatacagggccttttgagatttttggcaattgtaaacaaaaacgaatggtttttacaattcagtgtaattctacgaatatttatttggcac

SEQ ID NO: 640 - DNA, 225 bp, Homo sapien
acagcaatgtggagccccggggctgtgcagtccagcactgctgtccggctcagcagatccggaaaggggaggatactgttgaagagcaacaaccactcaccctgttggggagaaaggtgctgggaggggaagtccaggcctccttgtgccagctaccaggagggacactcacctcatcatgtagcagtgagaagtccagactgctcacaggaggaaaagtggggt

SEQ ID NO: 641 - DNA, 526 bp, Homo sapien
actgtgcaggtgggttagaggctgcgtggcaggagaggttcagattttcccctgatctgtaagatgtgtttagaggggaaatggtgggggcatccgggccatagaggacattcaggatgactgaatcactgcgcctggcactcactgggttctgggtttcacatttgtagcttgctgtgtcatttcttgtgacattgaatagagtgagggtcctgttgccattggacagctgcagcctgggactgaccgggaggctctgattgtttacccaccacaggtaggttgcgtcctgagtctcaggttcacaggtgaaggccacagcatccttgtcctccacgggtttggagttgttgctggagatggagggcttgggcagctccgggtatacccggaactggccagttgcttcttcattcacaagatctgactttatgacgtgtagggtgtagaatcctgtgtcattctggatgatgttctggatcagcagggatgcattggggtatattatctctcgaccactgtatgc

SEQ ID NO: 642 - DNA, 555 bp, Homo sapien
accgcggccgttaaacatgtgtcactgggcaggcggtgcctctaatactggtgatgctagaggtgatgtttttggtaaacaggcggggtaagatttgccgagttccttttactttttttaaccattccttatgagcatgcctgtgttgggttgacagtgagggtaataatgacttgttggttgattgtagatattgggctgttaattgtcagttcagtgttttaatctgacgcaggcttatgcggaggagaatgttttcatgttacttatactaacattagttcttctatagggtgatagattggtccaattgggtgtgaggagttcagttatatgtttgggattttttaggtagtgggtgttgagcttgaacgctttcttaattggtggctgcttttaggcctactatgggtgttaaattttttactctctctacaaggttttttcctagtgtccaaagagctgttcctctttggactaacagttaaatttacaaggggatttagagggttctgtgggcaaatttaaagttgaactaagattctatcttggaca

SEQ ID NO: 643 - DNA, 153 bp, Homo sapien
acactagcaagtatctgtgaatccttagcactggcgggttaacagaaatgctttggtaatacctacttagttaattggaggaagtagtaaataaacattaggtaatctgcagattacttcaaatgggaaaaatctttttgtagactctatagt

SEQ ID NO: 644 - DNA, 320 bp, Homo sapien
actaagcaaacaagcaataaaaaggggaatggggtgtgctagtgtttgaatatgctctcttgttgctctaattctgtgcctctgtgcattaatatttggatgcatgcaatgccagcatggaaattggtcttcacacatactgcagttttccagaaacattcacaaaccaataaatgtaacagacattccatttgttaatgggcatatatgtgaaaagcagtgtagaaaataggctaatattagaaaatggttaagtcctaaataacttcaagtgtggttatataatggacactgtcaatgttcataacttaaacctgggt

SEQ ID NO: 645 - DNA, 345 bp, Homo sapien
acaaaatccatcaggcatcttgcaggaatgtgtgcagtcagctcccgggaagaactgacggctccctgaattcttgggctggatttggtgagcactaaaaggaaccggattcgttaaacgctggtagaagtgttttccaatggctgcaacggttggtcaacctaacttacgtaagtttacaaccgaaaaaaaaatccacaatggaaatatagcaggtcgatacagccgggggcggctaggaaagagggaaaagtgaaaggtgagattacgagagtctattaagtgtctgggatataaagacagcgccagggaaaggggaagtcgcttctgagcctttcgggcagt

SEQ ID NO: 646 - DNA, 383 bp, Homo sapien
acctgcaatatatttggagtattatgtctttattgttgttaaaaagtttttattgaatgtatgaaaattatcaaattgtattcatcattattaacatgtcctggggaaggaagggaaactttctaggacagaagtcactttcagatgtcatgtatgtattgggtgttcaatcatatctaacactgttttgatttttgtgggaaaatattccaggaaacgctaattctctttagactccttgttcttttatgactacaatgaacatatgtctatgtgatagctaaagatatttttgaattgtatgtgtgcttaattatcggtaagtataaatatttgagaaaacacatggtctggatatttaaaaccctcataaacatgttggt

SEQ ID NO: 647 - DNA, 379 bp, Homo sapien
acctgctgaatctaaaataaaataatatacactaaaatgttaaaattgattttagtagaataaaaggtgactgaatattttaaaaagttatgcctagatgaatactttatgattttacattgcagcattttttgaacatggcagcagctactatgaattgtctatccaactgccactccagcttcctccctactaacaaaaccccagctcaagggcaagtgtgctcagtgccaggggatacactagtcgacccatccccctttgccagggcctggtccaagagtgggcacgtggccccactctataaagagacaggggggaggttgctggagctgctgacggttattcccggataagggcagaatgagaaggctcctgt

SEQ ID NO: 648 - DNA, 451 bp, Homo sapien
  misc_feature (1)...(451): n = A,T,C or G
cctnngttcctctgggggttgagaataagaatagtggggagggaaaaactcctccttgaagatttcctgtctcagagtcccagagaggtagaaaggaggaatttctgctggactttatctgggcagaggaaggatggaatgaaggtagaaaaggcagaattacagctgagcggggacaacaaagagttcttctctgggaaaagttttgtcttagagcaaggatggaaaatggggacaacaaaggaaaagcaaagtgtgacccttgggtttggacangccccagaggcccagctccccagtataagccatacaggccagggacccacaggagagtggattagngcacaagtctggcctcactgagtgggcaagagctgatgggcctcatcangggtgacattcaccccagggcaggcctgaccactcttggcccctcaggcattatcccatt

SEQ ID NO: 649 - DNA, 165 bp, Homo sapien
accatgctgtccatagctgtcgctgaaagtgtcctttgggggtatgagccagctcttccagcaacagcaggcaaaggtgggggaaaataagtagtgctggagggctcaaaatggtcagctgttagaatgtgcaagcacttggggacagcatgagcttgctgttgt

SEQ ID NO: 650 - DNA, 358 bp, Homo sapien
acccgggctccacattcatggatcatgtgttacgctatcaggacactccaggagtcaaaatgattgtggttcttggagagattgggggcactgaggaatataagatttgccggggcatcaaggagggccgcctcactaagcccatcgtctgctggtgcatcgggacgtgtgccaccatgttctcctctgaggtccagtttggccatgctggagcttgtgccaaccaggcttctgaagctgcagtagccaagaaccaggctttgaaggaagcaggagtgtttgtgccccggagctttgatgagcttggagagatcatccagtctgtatacgaagatctcgtggccaatggagtcattgt

SEQ ID NO: 651 - DNA, 180 bp, Homo sapien
accctaaccgtgcaaaggtagcataatcacttgttccttaattagggacctgtatgaatggctccacgagggttcagctgtctcttacttttaaccagtgaaattgacctgcccgtgaagaggcgggcatgacacagcaagacgagaagaccctatggagctttaatttattaatgcagg

SEQ ID NO: 652 - DNA, 246 bp, Homo sapien
gccctacaaagaaaatggagagcctcttctggtggatgctttgctccctctgagctgcccatgctggtctggcaaacacacctttctgctttgccttcacaaaagtaatgtgttccctttcccaccccttgcctgaccctcagggagtcagcctgcttccatccatgggtgggaagacttcagcacaaaggaaagactaattcttgtcaggcatttttgaaaaggctgattatgtgtatcaaggta

SEQ ID NO: 653 - DNA, 573 bp, Homo sapien
aggtacgtagtctaggccatatgtgttggagattgagactagtagggctaggcccaccgctgcttcgcaggcggcaaagactagtatggcaataggcacaatattggctaagagggagtgggtgttgagggttatgagagtagctataatgaacagcgatagtattattccttctaggcatagtagggaggatatgaggtgtgagcgatatactagtattcctagaagtgagatggtaaatgctagtataatatttatgactactaaattaataaatttattccacttttgaaatgacagccaaaaatccacctaattgattctcatttggcacgttcttctcaattctgttcactaaattaaaattactaaatttaaactgccaagagccatgatgttgtctgcacaagacaacattttccatcactttcagaaagttatatttggcatgttaaggaaaaaaaatataatcccacagcagcagctatttaaaataagacagccacaggattcatgcagaatatttttaaatattcctgttgaacacaatgatttaattgattttttcttcac

SEQ ID NO: 654 - DNA, 474 bp, Homo sapien
gttttcctgagcagaagcaaagcctcaaaatacatgcacaccaggtaggattattgttaatgaaaagtataatttcagtgtctttacaacttagtttgtgtctaaaatatgaactagtgtttttttccacttgttaaattgatcttgtatttggttttgcgaattttcaaacaaagaataaagaacatgaaattagactatatattctgtcattttcccctgagttttttctaatcttgtcccttcatacttttccccaaaggctcagcgtcttccatttctttcaagctcaaatctttcactggatgttttgaggggtaatgatgagactattggatttgaggatattcttaatgatccatcacaaagcgaagtcatgggagagccacacttgatggtggaatataaacttggtttactgtaatagtgtgctgttcatggaaaccgagggctgcatttttttcaggtgtcagt

SEQ ID NO: 655 - DNA, 603 bp, Homo sapien
actgaatttctgtcagttaaggggttcactgctttggtggaaattggtggaaattgctagcaggttccacgatgtttatttttttctccatgttgtatatcattaccatttcacatacgcgtttctatttttcttcctctcctcctgatctccttaaaaatgaatctagagttggtggctttttccccctcctctttggccagttccacagttcagttcttcctgaaaacagggatgatgaacttgtaggatcaggacaaatgtgtgtttttcaaaaacttaaggctgggtgtgaaacaccttctgtggacaaggatttgtaaacttctctcctccctccagctgcggccccagcctaactgatagttacttgattcagtgtgctagacacttaaatagcatctatgtctctttcaagggaatttgtcaaataatgctgtttagctaattgttgcaagcaattgcatattaacagctgtgattttgttggacagcaagtattatggccaaagccagtttcttggcatttcaaaaataatgcaataaaaaactagttgaggttagctgaggctggaaatgccttttcatggtaaatgattcact

SEQ ID NO: 656 - DNA, 361 bp, Homo sapien
acctactgttcagtcttcacgccatagtgaagcttggaatccctcagaacactattttggtgcagactttgctgagggtgacccaggaacgtatcaatgagtgtgatgagatatgcctttcagttttgtcaactgttttagaggcaatggaaccatgcaagaatgttcatgttctacgaacgggattcagaatactagttgatcagcaagtttggaaaatagaagatgtcttcacattacaagttgtgatgaagtgtattggaaaagatgcaccgattgctcttaagaggaaactggagatgaaagccttgagggaattagacagattttctgttttgaatagccaacacatgtttgaagt

SEQ ID NO: 657 - DNA, 264 bp, Homo sapien
  misc_feature (1)...(264): n = A,T,C or G
tacctgatctctntaggtatggngctgggtgcagatgcagngtggctctggatagcaccttatggacagttgtgtccccaaggaaggatgagaatagctactgaagtaagttgaaaattccctctcaaaaaggtttaaagccattggatgtgccacaatgatgacagtttatttgctactcttgagtgctagaatgatgaggatcttaaccaccattatcttaactgaggcacccaaaatggtgagttggggaacatagagagt

SEQ ID NO: 658 - DNA, 232 bp, Homo sapien
accatcaaataatctggtgaatggcatgtgagaataaagcaaaagtgtattaagatttactgatgactggcattcatggtatctgaccagaagaagtaaagggaagcacgaaccaatgtgtttgcagggctcttctgggaagaacagctcttggttttgccctggtccctgacaatgacagactggcaggctgtttcttgcacagctctaggcaagccattaatctgtcagt

SEQ ID NO: 659 - DNA, 638 bp, Homo sapien
  misc_feature (1)...(638): n = A,T,C or G
acattgtagccctctgcctctctacccttaacagctgcatcgacccctttgtctattactttgtttcacatgatttcagggatcatgcaaagaacgctctcctttgccgaagtgtccgcactgtaaagcagatgcaagtatccctcacctcaaagaaacactccaggaaatccagctcttactcttcaagttcaaccactgttaagacctcctattgagttttccaggtcctcagatgggaattgcacagtaggatgtggaacctgtttaatgttatgaggacgtgtctgttatttcctaatcaaaaaggtctcaccacataccatgtggatgcagcacctctcaggattgctaggagctcccctgtttgcatgagaaaagtagtcccccaaattaacatcagtgtctgtttcagaatctctctactcagatgaccccagaaactgaaccaacagaagcagacttttcagaagatggtgaagacagaaacccagtaacttgcaaaangtagacttggtgtgaagactcacttctcagctgaaattatatatatacacatatatatattttacatctgggatcatgatagacttgttaggctncaaggcccctcagagatgatcagtccaactgaacga

SEQ ID NO: 660 - DNA, 502 bp, Homo sapien
  misc_feature (1)...(502): n = A,T,C or G
acctgtgggtttattatctatgggtttatatcctcaaatacgacattctagtcaaagtcttggtaatataaccaatgttttcaaatgtattctgtcatacaaagagcagatttttattgaacttgtgcaataactatattaccatacaatataaatattcatgaatagtttcccaagtctggagcgaccacatagggagaaaatgtaaatgtctcaatttttgttcacaaaagtatattttatcaaattgctgtaagctgtggatagcnttaaaagaaaaaaagtttcctgaaatctgggaaacaagacatttaaagaatcagcaaaatttcaaataaaaaattatgaaaatattatcctcattagttcatttagtcccatgaaattaattattttctctgcttgatcttggtggacagtttcatgaagctgtcagttagttcattaaagttttggaaattctcagacagtgcagtggtatcagaaacttgtattcaagagt

SEQ ID NO: 661 - DNA, 112 bp, Homo sapien
actttagtcataatcgtgaagctggctaggtttccagtaaatatcagcattttatatgggcaaaagcagttaataaaaatcagttcatttactgtaagccaaatgtgcttgt

SEQ ID NO: 662 - DNA, 530 bp, Homo sapien
  misc_feature (1)...(530): n = A,T,C or G
actgccggntaacgctgtcgtttccattgagcctgaactgatgggtgaggtcgtagattctccaagaagaactgaggttgtggagcgggcaggtaggactattgttcccgttgcgtcttggctgctgtgggatgctgttgattcctcactacggcctgaggttgtggagctgtcagggaagtgtgttgttgcagttgagcccgggctgctgtggtagctggtaggttcttcaacaagggcagatgtggtgctaggagctgaagatattgtgtgtgttgtgctgctgtgggaagttgttgattcttcaccacggcctgaagttgtgtcgctttcagggaagtgcattgtttgagttgaggcccgggctgcctgtggtaggtcgtagattcttcaacgaggcctgaggttgtggaggtgggcangcgagggtgttgttgcagttgcaactgggctgctgtggactgttgtccgattncctcactacggcccaaaggntgtggagctggcngaaaaagtgggttgttggagtt

SEQ ID NO: 663 - DNA, 255 bp, Homo sapien
accttcaatgtcattaaccataaatgagcatttacaatctggattaaatgtcacatggtattaagtctacacttagagtaatgcttttactgatttttaaaaatatgtgcatatgtttagtgatcgagaaaagtgaaatactggagtactctgggtgcaataaataatatgtagaaatttaagtcctccaattccagcatatccagtgagttttgacagtgtgtttatgtggaatgtttaaggatatacaattgt

SEQ ID NO: 664 - DNA, 496 bp, Homo sapien; identical to SEQ ID NO: 302

SEQ ID NO: 665 - DNA, 292 bp, Homo sapien
  misc_feature (1)...(292): n = A,T,C or G
ttttttttttttttttttttttctctanagggggtgctatagggtaaatacgggccctatttcaaagatttttaggggaattaattctaggacgatgggcatgaaactgtggtttgctccacanatttcanagcattgaccgtagtatacccccggtcgtgtagcggtgaaagtggtttggtttaaacgtccgggaattgcatctgtttttaagcctaatgtggggacagctcatgagtgcaagacgtcttgngatgtaattattatacgaatgggggcttcaatcgggagt

SEQ ID NO: 666 - DNA, 250 bp, Homo sapien
acttggatgaggaactgatggtcctaagctcaaacagcatgtctctgaccacacgggagccctctcttgccacctgggaagctacctggagtgaagggtccaagtcttcagacagagaaggaacccgagcaggagaagaggagaggagacagccacaagaggaagttgttcatgaggaccaaggaaagaagccgcaggatcagcttgttattgagagagagaggaaatgggagcaacagcttcaggaaga

SEQ ID NO: 667 - DNA, 259 bp, Homo sapien
  misc_feature (1)...(259): n = A,T,C or G
ccgctctccagcccgcttgaacgctccccgcagccaccgccacccattggaatggccaacaggggacctgcatatggcctgagccgggaggtgcagcagaagattgagaaacaatatgatgcagatctggagcagatcctgatccagtggatcaccacccagtgccgaaaggatgtgggccggccccagcctggacgcgagaacttccagaactggctcaaggatggcacggngctatgtgagctcattaatgcactgt

SEQ ID NO: 668 - DNA, 248 bp, Homo sapien
actgatgaaagttattaacacgtttcgaaaaataactttactatctgacgtgttgcttctgccgaggatgaccgttattcctgtttttgcatgtatatttcacgtatggttaaatgtgccagcgttgtggtttaaaactaatagtaataatatgcttctttgttcagttggctagagatttactacatccgtccttggaagaggaaaagaaaaaacataaaaagaaacgcctaggtactgcggcaagt

SEQ ID NO: 669 - DNA, 430 bp, Homo sapien
  misc_feature (1)...(430): n = A,T,C or G
acctgcaaattcttancaatacctttaccaccagattagaacagtaagcataataaccaatttcttaataagtaatgtcttacaaataaaaacacatttaaaatagctttaaatgcattcttcacaagtaattcagcatatatttttatatcatgtttacttatgcttaagaattaaagcaagtatatttattactctgatggaaatatgggaaatctctcattcatgcaatatacagggataatattcaagcgaaggggaaattcccgctttttatttttgtaaatgnatccatatataatcatcgacatgacagatgaggaaacccatgaagtttcccaactantcanatatacattttcacttcatcaggaagcnccctgatatctacagctaatttataattagatactgtttcaatgaaaccaaa

SEQ ID NO: 670 - DNA, 435 bp, Homo sapien
  misc_feature (1)...(435): n = A,T,C or G
caggtactctgaggcttgtaggagggtaaaatagagacccagtaaaattgtaataagcagtgcttgaattatttggtttcggttgttttctattagactatggtgagctcaggtgattgatactcctgatgcgagtaatacgggtgtgtttaggagtgggacttctaggggatttagcggggtgatgcctgttgggggccagtgccctcctagttggggggtaggggctaggctggagtggtaaaaggctcagaaaaatcctgcgaagaaaaaaacttctgaggtaataaataggattatcccgtatcgaaggcctttttggacaggtggtgtgtggtggccttggtatgtgctttctcgtgttacatcgcgccatcattggtatatggttagtgtgttggttagcaggcctagtatgangagcgttatggagtg

SEQ ID NO: 671 - DNA, 379 bp, Homo sapien
  misc_feature (1)...(379): n = A,T,C or G
acctcaggtgccaggcatgnngttctccgctgtctggagtcttgctttgggagtgctacacctgtgggagtgccccaggcaccacccaaaggcggggctctggctcaagcttgcatggtttacagagcctcacatgatgtcctttcaggtttgttgagttggggctagggactcggtggcagcagagcctggttctcctgcctgaccaggccttggcaggacgcctcttcccttctgtggagaagatggagaagcagagaagcaggatacagagcaggctggaaaggactagaagcctcatggtgagaaggcagattttcacgtcctgggaagggagctgtgctgcagaagtcctcccttggggccaccttggacattt

SEQ ID NO: 672 - DNA, 546 bp, Homo sapien
actgtttactaattcaaagaacactatattcattcatatcaattttattcattaattatgaacaataaaatataatattccatgcttttcatgaaatagtggtttcttcttccagtctaatcagggaactaataaatgcttagttcatgggaaaacttccatttgatttacattgacttaattacttcttagggtctagcctcatccatggagaaaaagcactttttcttgaggcaacagcaaattaacagcactgatacaaaatatggcaaattcaatggttgtagcattgctttaggaattttgagactataaataaaactataaccataaataaaagggcttattaatatcttcttttcaggagagtgatacattctgaagttttcttgttattctgttgaatagcaaggacttccaaacttaaatgtcttaaggctgaaaattagttatattcctcaaattttagccttattaatgaaattccaaaagtattataaaataagattcaatttgtcttgaaattataaatttgtaacagatatt

SEQ ID NO: 673 - DNA, 497 bp, Homo sapien
  misc_feature (1)...(497): n = A,T,C or G
cacgaggaactcatgcnaaggaggggactttcggaaatccaaacttagagtgccttgtatttagaatccggaaggaaaaggaaatgaaatgtgaagaaactcatgcaccaaactcgaactggtaagaagactgttagaatgccctcggtaacacagaggctgagagatcctgacataaatccttgtttgtcggaatctgatgcttccaccagatgtctggatgaaaataactatgacagggaaaggtgttccacttacttcttgaggtacaaaaactgccggagattctggccgtgaaagatccttgagagctcttgttagctgcctcgtcgtcctctaagctataagaatgcagttttaatatagaattctatcgtgatgcagagaagaaagaacggagtgaagccatttatgcctacngcagcagaaagagatgaaatcttgagagcagtgggaaatatgccctatttgaatgtttgcattaaaagtgtttatat

SEQ ID NO: 674 - DNA, 550 bp, Homo sapien
  misc_feature (1)...(550): n = A,T,C or G
acaaagtaatgaccataataccttgtctaaatcagtagcagggcttcatggctaggaaacttttttaaacagtaaaatgtcattaggatagatcactctctcaccaacattaaatgtggcagaattaaccaaaaaaaaaaaaaaaaaaangaaaaaaagatttacacgtagatatagcagtaacagaaaattacaaggnngagaacacaaaagaatcaagacaacgctataggttcaacagtattccatgaggctagaaaaccggttaactttgaaagccctagcaaaatatcactctttgtttataaatcacttatttatcatatgaccacacgttgaatccttgtctttccacatactgaagaatcctacattcagcctttaagcattctgcatttctttgccaatcttgtagctgagtatcttgttccagtcgattttggtgcgggtaactggaagctgccgggcgcaaggnccttgaatgtggtatctgacattgtttgatagttttcactaattgctgnctgatactnattttctgcattctcta

SEQ ID NO: 675 - DNA, 162 bp, Homo sapien
  misc_feature (1)...(162): n = A,T,C or G
actttccacagtnaaatttacattaatggcaatttttgatagttttatggctttttactgttanactaatcaaaaataactttaaaaggaacaaagaaactccaacatttcacattatgcatagttatgtagccatttcacagtttctttaagatgtgtaaa

SEQ ID NO: 676 - DNA, 349 bp, Homo sapien
acttatgttgaggaaatcacagaccttcctatcaaacttcgattaattgatactctacgaatggttaccgaaggcaagatttatgttgaaattgagcgtgcgcgactgactaaaacattagcaactataaaagaacaaaatggtgatgtgaaagaggcagcctccattttacaggagttacaggtggaaacctacgggtcagtggaaaagaaagagcgagtggaatttattttggagcaaatgaggctctgcctagctgtgaaggattacattcgaacacaaatcatcagcaagaaaattaacaccaaatttttccaggaagaaaatacagagaaattaaagttgaagt

SEQ ID NO: 677 - DNA, 214 bp, Homo sapien
  misc_feature (1)...(214): n = A,T,C or G
tgggatacaggncacgggcagagctcctggcctcaatgatgcctcctgatctatcgctgggcctggacgaccaacactgggatgatgatgagcagaatggtcatgaagatgcccaaaatcagggcccagatgttcaggcacttggcggtggaggcataggcctgggccccggtcacgtcgccaaccatcttcctgtccctagacttcacggagt

SEQ ID NO: 678 - DNA, 195 bp, Homo sapien
  misc_feature (1)...(195): n = A,T,C or G
accattggtggccaattgatttgatggtaagggagggatcgttgacctcgtctgttatgtaaaggatgcgtagggatgggagggcgatgaggactaggatgatggcgggcaggatagttcagacggtttctatttcctgagcgtctgagatgttagtattagttagttttgnnntgagtgttaggaaaagggcgt

SEQ ID NO: 679 - DNA, 59 bp, Homo sapien
aggaacctaactatgttcagtactccagatatacttcctgaactgacctggatgaagaa

SEQ ID NO: 680 - DNA, 244 bp, Homo sapien
accattggtggccaattgatttgatggtaagggagggatcgttgacctcgtctgttatgtaaaggatgcgtagggatgggagggcgatgaggactaggatgatggcgggcaggatagttcagacggtttctatttcctgagcgtctgagatgttagtattagttagttttgttgtgagtgttaggaaaagggcgtacaacgtgcgatccatgcccatccgaaaggatgatgaagttcaggttgt

SEQ ID NO: 681 - DNA, 155 bp, Homo sapien
gatttttagggttgtttggccagaacaagagaaataactgcagaaaacacatatggttggaaaccatgcgcttgtgactttttctgtagcctatgggagtggacagagtgggtaacccaagatgtttttaagactgactggactaagaatgacgt

SEQ ID NO: 682 - DNA, 284 bp, Homo sapien
actgagcccatatgacttgacccacaaggggaaatactggggcaagttctacatgcccaaacgtgtgtagtgagtgtaggagataactgtatataggctactgaaagaaggattctgcatttctattcccctcagcctacccactgaagtctttgggtagctcttaagccataactaaggagcagcatttgagtagatttctgaaaaacaatgttatttgttgatttaaaaagaaaactgtatttttattaaataaaatttaaacatcacttcaggaaaaaaaa

SEQ ID NO: 683 - DNA, 272 bp, Homo sapien
acactttgtgttaaaattcatagggaagacttcttaaaaacaagtgaaattgttaaaaccccccctaagcattacagatggcttatagctgtccacggggttggtagaggtgggaaagggaagggttctaggccagaatgttcctatttagaagacactcaaattacagtctgtgttatgtatgtataccatttattcaatgctactgtgtatataatggaaaacttaagtccagtttgaaacatctagtctttctaggtgtttaaaagtgt

SEQ ID NO: 684 - DNA, 384 bp, Homo sapien
accattcgaccacaggcagcaaaggacagaacttgatcagctaaaacatcataaccttcaagggcctataggacccttctagaattttctgaatcaggaacggcccatgttgtggcctgtgtagtcaggtgtatattaaagatttactccaggtagatgggttttgctttccaaaattattgtagggttctcagccacaaagataaaaagaaatcttgaactgcaattgaaataaaacatggagcccccaaatccctagctgccatatgatttgaatcagttggagaatgtaaaatcattgccatggtgtgatgtaacaggagtgaagagccctaggtcttggttctgttgctgtctggctgtgtgagcctgggcagttcatgt

SEQ ID NO: 685 - DNA, 652 bp, Homo sapien
  misc_feature (1)...(652): n = A,T,C or G
acttttgagtaaactattcagattagacaggctaatgctaagactgcattttgtgctactgacatgcactatatagatcgtacactactagatggaaagttggtccatgtccatttatttaaagattctgtaacacctgtaatagtatttaatacagctcccacatactatattcctctcacatagacatagttatttttagtggggataaggatatgactttaacatgctatgagattctagctaagtaaaataaaaacaatatggactcagattttcttaggagatattagttcaagtttttaaactgggaaacaatcaacttccatatatccaggagaaacttagcatggggggaggtgccttagttgatgtgcctgataagcaaactgttagttgtctattagtattatgttttcggcttaatgtaacaacaaaagaaagttgtcacactacctctcagataatatcaattacaatcttagagactgtaattgggaatacaatcctataacaagttattaacaatatcatgaatagttattaagtaagtgccagcactacatgcaacttactggtcaccaactcagaacccataaaactatacacatatgcacaaaaaaaaaaactccaangaagatacctatcactg

SEQ ID NO: 686 - DNA, 536 bp, Homo sapien
  misc_feature (1)...(536): n = A,T,C or G
accagctactgaatacaccggatctagatatgcccagttctacaaatcagacagcagcaatggacactcttaatgtttctatgtcagctgccatggcaggccttaacacacacacctctgctgttccgcagactgcagtgaaacaattccagggcatgcccccttgcacatacacaatgccaagtcagtttcttccacaacaggccacttactttcccccgtcaccaccaagctcagagcctggaagtccagatagacaagcagagatgctccagaatttaaccccacctccatcctatgctgctacaattgcttctaaactggcaattcacaatccaaatttacccaccaccctgccagttaactcacaaaacatccaacctgtcagatacaatagaaggagtaaccccgatttggagaaacgacgcatncactactgcgattaccctggttgcacaaaagtttataccaagnntnctcatttaaaaagctcacctgangactcacactggtgaaaagccatacaagtgtacctg

SEQ ID NO: 687 - DNA, 201 bp, Homo sapien
  misc_feature (1)...(201): n = A,T,C or G
acggccagggctattnnntgaatgagtaggctgatggtttcgataataactagtatggggataaggggtgtaggtgtgccttgtggtaagaagtgggctagggcatttttaatcttagagcgaaagcctataatcactgcgcccgctcataaggggatggccatggctaggtttatagatagttgggtggttggtgtaaat

SEQ ID NO: 688 - DNA, 452 bp, Homo sapien
acttgttccaactcaagacccaggaccacccccaccttctccattactaggtttgaaaccactgcagttattagaagtgaaagcaaggggaagatttggttgtgtctggaaagcccagttgcttaacgaatatgtggctgtcaaaatatttccaatacaggacaaacagtcatggcaaaatgaatacgaagtctacagtttgcctggaatgaagcatgagaacatattacagttcattggtgcagaaaaacgaggcaccagtgttgatgtggatctttggctgatcacagcatttcatgaaaagggttcactatcagactttcttaaggctaatgtggtctcttggaatgaactgtgtcatattgcagaaaccatggctagaggattggcatatttacatgaggatatacctggcctaaaagatggccacaaacctgccatatctcacaggg

SEQ ID NO: 689 - DNA, 254 bp, Homo sapien
acaacagttgagagcagcaccaagtgcatttagttgaatgaagtcttcttggatttcacccaactaaaaggatttttaaaaataaataacagtcttacctaaattattaggtaatgaattgtagccagttgttaatatcttaatgcagatttttttaaaaaaaacataaaatgatttatctgtattttaaaggatccaacagatcagtattttttcctgtgatgggttttttgaaatttgacacattaaaaggt

SEQ ID NO: 690 - DNA, 481 bp, Homo sapien
actttctccctttgtaaagacttggggagtaaggacattaccaactaaattgcttcttcgaaactgaagtgagtcccggtttgtttcattttaatgggagggtaataaagatgaaagaccaacattttaactgatggatcccttaagctacagaatagaaatttattgtgttttgagggaatatactaaatgcagctatgtaaaaataaaattcaaacgcccaggattaaaataaaatataatctgaaaacctcatgttctctctttccccaaactaagaaagtgcactgcatgctgttttcacttattcttagaaaacaagcatgaaagattccgcccattcagataatgccaaaaatatgtttaaacttttttttattcttttgaaaaatgatttgtaaattgagggtcatagttcagcatcagtttcatcttctgggattattgttcaagaccagcctctaatgggaggtgaaacggt

SEQ ID NO: 691 - DNA, 291 bp, Homo sapien
acaccatgctggcaggatatactccatttgccaacggtcccagtgacacaccagaggaaatcctaacccggatcggcagtgggaagtttaccctcagtgggggaaattggaacacagtttcagagacagccaaggacctggtgtccaagatgctacacgtggatccccaccagcgcctcacagctaagcaggttctgcagcatccatgggtcacccagaaagacaagcttccccaaagccagctgtcccaccaggacctacagcttgtgaagggagccatggctgccacgt

SEQ ID NO: 692 - DNA, 411 bp, Homo sapien
  misc_feature (1)...(411): n = A,T,C or G
accagaaaggttggggaccactggcttaaaataccaataaatttttgaaccttaaaaactttgaagaacaaggtaaattggtgttttatttaatgtcctaccctttaatttgttgcattttcctatactctttacactattttatcccaaactatgtatatgaggtgaaaatatatatgaaaagggatactgaagaatatttagtttaaaattaatttcttacgatcacgagcacatggtggcataattacaaagcttggaagtattcaaatagaaaatcaaaggtgtttcaatacagtagaatcccaggactgcattttaaaatcgcctcacagatcacactcnctggtggcaaatatcatcatcgttgctaaaggacagaaaatactgatgtgtgttttaactaactgg

SEQ ID NO: 693 - DNA, 308 bp, Homo sapien
acttccaatcacttcctctatccagaaaatccgtgacactacatgccagctactttgcatatttataactgtttaataaactattcaaaattagcatctaaaataattatactttgggcacacgaaggcatatatttggtgagaacattgtaattttcattttgtaaactatatattctatattcaagtaataacacagcattgcctatacagaactgaggcctgcgctgagacccaaaacttgtcttttcctaaatgcaccactacgaagagctaataagaggtctgtccagatgctaagaccaggt

SEQ ID NO: 694 - DNA, 300 bp, Homo sapien
actccaccatttaatagggtaaagaagagaaaccacgtgattatagcagttgatgcagaaaaaccatttgacagaattcaacacccatacatatttaaaaactctcagaaaaataggaattgaggaggacttcctcaacttgttaaagagcacgtgaacacacaccaaaaaaaaccccacaactaatgttatacttaagggcaaaaggtcgaaggccttgttccttagattaggaacaaagcagtaatgtctcttctcaacattaatcaacatattgatggaagttctagccagtgcagt

SEQ ID NO: 695 - DNA, 313 bp, Homo sapien
  misc_feature (1)...(313): n = A,T,C or G
acaagcttttttttttttttttttttttttttttggttaaaaaagtttaatgagctgtaaaataaatacacttggcattaaatattaannnaattatttacaacnngaaaaaatactttttaccttcgtgcncctttatatacagaaatagcataaaaagtgacaattgaaagtttaaaaccatcataacaaaaagggtccattgtcttatgatccactggaaagaggaccgactcatcatttatggctntgacttggcagngactccaatgngatatcctgtaattttatcttcagntatgctatagcatgt

SEQ ID NO: 696 - DNA, 273 bp, Homo sapien
actggcccaggacagagctgccaaactggttgctgctgtctgccaaggttgctgcagttgagacgtctgtgcggtctgggtaactgagggaggctgagcggctgagtggggtggggtgtgctggggaacggtcggaggggaccgaggtcagggccatagtcccatagtaggagaaggcgcccgtctcaaacttcatgttctccttccctgcctccacctccaccttcccctgcaggatgaggatgaagtagtcggccggcttatttcgggtgt

SEQ ID NO: 697 - DNA, 445 bp, Homo sapien
accaaagtcaatgaacaagaaacaccagttgactttaagacaatgacgaagattaaagcttaagggaaaaaaataaaagataaacatctgaaagcagcaccagatccttcacttgcaaataaggctagtccagtttaatcttcttggtatcctctctactttttaacatttttccttactaatccatatatttaatttcatgtcatattggatttaatcagactttaaaaattttccctttaatacccatatttaggcattagatatatagaatatgtatctatatataaatatatctctatcgcccatcctgcttatatttgactgaaaaacacaaccaccaaaatggacagttcagcaaaagcgcgttgtctgtaattctctggtgttgcttctgggcaaaccctaagtgatggtggagaatctaacagttcgttaggtctgt

SEQ ID NO: 698 - DNA, 495 bp, Homo sapien
acacggtgacctcacagaaggagggctatgttctgactgcggtggaaggaaccatcggagacttcaaggcctatgccctggcaggcgtaagctttgagataaaagctgaggatgaccagcccctcccgggagtcctcttatccctgagcggtggcctgtttcgttccaacctcttgacccaggacaacggcattctgacattctcaaacctgagccctggccagtattacttcaaacccatgatgaaggagttccggtttgagccatcctcacagatgatcgaggtgcaggaaggccagaacctgaagatcaccatcacggggtaccgaaccgcttacagttgctatggcacagtgtcttccttaaacggagagcccgaacaaggggttgccatggaagcggtgggccagaacgactgcagcatttacggagaagacaccgtgacagacgaagagggcaagttcagattacgtggattgctgccgggatgtgtgt

SEQ ID NO: 699 - DNA, 413 bp, Homo sapien
agatgacaaagaaaagaaggaacaatggtcgtgccaaaaagggccgcggccacgtgcagcctattcgctgcactaactgtgcccgatgcgtgcccaaggacaaggccattaagaaattcgtcattcgaaacatagtggaggccgcagcagtcagggacatttctgaagcgagcgtcttcgatgcctatgtgcttcccaagctgtatgtgaagctacattactgtgtgagttgtgcaattcacagcaaagtagtcaggaatcgatctcgtgaagcccgcaaggaccgaacacccccaccccgatttagacctgcgggtgctgccccacgtcccccaccaaagcccatgtaaggagctgagttcttaaagactgaagacaggctattctctggagaaaaataaaatggaaattgt

SEQ ID NO: 700 - DNA, 441 bp, Homo sapien
  misc_feature (1)...(441): n = A,T,C or G
acgggaccctgnncacgatggaccgggtgctgacccccccaatggggactgtcatggatgtcctgaagggagacaatcgctttagcatgctggtagctgtcatccagtctgcaggactgacggagaccctcaaccgggaaggagtctacacagnctttgctcccacaaatgaagccttccgagccctgccaccaagagaacggagcagcactcttgggagatgccaaggaacttgccaacatcctgaantaccacattggtgatgaaatcctggttagcgganncatcggggccctggtgcggntaaagtctctccaaggtgacaagnctggaagtcagcttgaaaaacaatgtggtgagtgtnnacaaggagccctgttgccganncctgacatnatggccacaaaatggcgnggttccatgtcatcaccaatgtttctg

SEQ ID NO: 701 - DNA, 487 bp, Homo sapien
  misc_feature (1)...(497): n = A,T,C or G
acatcaaattataaatgcaaaacaggttcagatttcatcttttgtgatttcttttaaatactattcatttttatttaaatgcacagtatttcccctatattttagtccttccattcctagagacaaaccagttatttggtggtgggaagtagctgaagcaaagaaggaaaagtaataccttagcttcaagagtagacattcttactagctcaatttaaataattgattttaaataggaagaaaagaggatatatttaagatacatagaaattatgatgtgaagtattcatgagaatctgtnnattccatcaaaataagtaggaactcatactaaaattgttggatttaaagaggcaacttttgtttatgattcaaatatgggaatttgagaaatatttcatttgtncactggatgtcactattttactaaaaaggcagctnttagngtgggactgtgactgaggtcttaaagactgaaagagttggg

SEQ ID NO: 702 - DNA, 304 bp, Homo sapien
  misc_feature (1)...(304): n = A,T,C or G
tttttttttttgntcggctcagtctaatcctttttgtagtcactcataggccagacttagggctaggatgatgattaataagagggatgacataactattagtggcaggttagttgtttgtagggctcatggtaggggtaaaaggagggcaatttctnnntcaaataataagaaggtaatagctactaagaagaattttatggagaaagggacgcgggcgggggatatagggtcgaagccgcactcntaaggggtggatttttctatgtacccgttgagttgtggtagtcaaaatgtaataatt

SEQ ID NO: 703 - DNA, 366 bp, Homo sapien
acaaagggactacatcgttggcttttgaccttgctgaaaaggaacatataattgtatggatggtaggattaagttgttgagtagttttgtaatcaagattttatgtaacatttgtaaagggaaaattagcacttttgtggttcttaagggaaaagaaacagaccttgtggagattataatttccttggtttctgttaccactgttagagggagttgtatcatttaacatatagtaggatagtttaagtgtagggaggacaattattgtctgaagctaaaatgggttatttataggactgatggaaatgatttcatctccgccatctctaaagcacttttcattgaacatgttagcctaggatacgt

SEQ ID NO: 704 - DNA, 449 bp, Homo sapien
  misc_feature (1)...(449): n = A,T,C or G
acatggtcacataanaacaaatctaatggaaaaagaatatttcattctacttttctgccacttatcacagtgtaataagtgccagtaagtcctggaagacagttgcagaggaagattagaatcccagggctgtttgttaatatacatgattatattgtaagaataatataaaaacaaaataggtaagatatacaattaacatgcaatttaagctatattattttgaagaaacaggacagaatttagtgaacgcaacttaaaaatttgttaatgtagtataatcagcatatcatggtattttacatggtatggaattattcctccttaataatgcttggcaaattggaacaggctgatcctacttctagaacatattaaaatgaagatgaaggaaaacaagttggataattctattagatgcttttctaaatattctgaatttttaaagt

SEQ ID NO: 705 - DNA, 399 bp, Homo sapien
  misc_feature (1)...(399): n = A,T,C or G
acgatgtctagtgatgagtttgctaatacaatgccagtcaggccacctacggtgaaaagaaagatgaatcctagggctcagagcactgcagcagatcatttcatattgcttccgtggagtgtggcgagccagctaaatactttgacgccggtggggatagcgatgattatggtagcggaggtgaaatatgctcnngtgtctacgtctattcctactgtaaatatatggngtgctcacacgataaaccctaggaagccaattgatatcatagctcanaccatacctatgtatncaaatggttctttttttccggagtagtaagttacaatatgggagattattccgaagcctggtnngataagaatataaacttcagggtnaccgaaaaatcagaatagg

SEQ ID NO: 706 - DNA, 488 bp, Homo sapien
  misc_feature (1)...(488): n = A,T,C or G
gtcagactggatggnnngtgaagtaaaatagtatgaacaattaagaggctctccccctcttgtctttaagccatattctcctacatgtattttataagaaaatgttaagtcaaattttagtggctctttaattcctgacctcttcattctccttttcagtataacctcccctatgctcatgcccacacagacaaaaaaacaaaacgaaatacacacagaaaaaagtctttccaaactgtttaagtatttaaacatctgagccaaagcagatagaagttattgtataattgttaatcactttgcaaataggggctatcagattacctatattggcattgctggattataaactctatatctgtaatataaagngtttgagtttttaattgggctgttatgatcagtagttgattttgagaaagctctatgagctctaagtaactgcatggttttttgttttaatgtaatatagggagacccttcacatt

SEQ ID NO: 707 - DNA, 385 bp, Homo sapien
  misc_feature (1)...(385): n = A,T,C or G
acccagccttgctctcattcccaggacaggaacaggagagcagtgcacctcccaggatgactagggcagaccctgcccagccaataaagatggcagggccaaactcatacttaatgttggtagggatcaaagggttataaaagtctgtgacaatctgatggccataccaggagcaagctaccaaggcggcaagacctgccacgatgaaaattatgcctccacccatggctatacgggccttcttcactttgtcgtctcccccacagcgcgtgcacttcatgcccatcgtggccncaancatggccaggaagcccagcaccaggggagaccaccattanggctcgagtggcctgcaaggccgcggacagggcgagcnccgagtcgt

SEQ ID NO: 708 - DNA, 390 bp, Homo sapien
  misc_feature (1)...(390): n = A,T,C or G
acagcattctggaataaagcaagagtgttcattcacacacacagtagcttcaaaactgttcgatctgtttgttcccatgtagttttctaaagatggaaaaaaaggactttggtcatcaagactactgtggccatattagattactggaacatctaagcatcanntgtgtgaccatgcgaacaaaagacttcggggagtgtctatttttaaaaaggtttatgtgtgtcgaggcagttgtaaaagatttactgcagaatcaagcccacttttaggcttaggaccaggttctaactatctaaaaatattggctgataacaaaaagtgttctaaatgtggctattctgatccatagttgttnttttnaagaaaaaaatgtatatacagaacctg

SEQ ID NO: 709 - DNA, 551 bp, Homo sapien
actatgctaggtataggtaaccactcttcacttttcttctttcttcaataagaagatttggctaatccttgcaacgtattagaaaaatactcttttccagctaattagaagcctcctccgtggcaaggcgacaggcagaaccagttggctgacctaaccacctgtgcacccaaagtggcgagtctgggtttggagttgcaggagaaagacacttaggcattggaagggtttttacatatggccttgttttttccccaagtataaatgaggaatttggtgatgtgaaattgagtccaaaatgaaacgaaaacataaacccatgaagaaaatgcaacccaccactcttcaaatttatgacatttaaaaatcccctctccccattaatataaaatagccaggggttggggggaaaaagctccctatggttttattcaccataaccttagtgtttctcaattggaacttgttcgtgggaacactgatttgtgtttgaggaaactatttggtttgcaaaacaacaagcaaaatttcttacttcactagtatcctat

SEQ ID NO: 710 - DNA, 307 bp, Homo sapien
acagataaattacataattaacttttttgtctattaacaatttccttaaatatttctgggattaatatatcatttcatgttacaactgcagaaatatgaattaccatatcagtctttaaaaatgccgaattctatagggcccagtagtatactttacattttgtaatttttaaaattcagtgtatttacaggtctctaaatgaatcactttagaatgcttgatttcactcttggtaaatagaatgattacctgtattttatatatgcaactgtttacaaccaaaataagattgatttagaacaaagt

SEQ ID NO: 711 - DNA, 544 bp, Homo sapien
  misc_feature (1)...(544): n = A,T,C or G
accacagcaaaacaacttcagtgactgtggtgtatatgtattgcagtatgtagagagcttttttgagaatccaattctcagttttgaactacctatgaatttggcaaactggtttcctccaccaagaatgagaacaaaaagagaagaaatccgaaacataattctgaagctacaggaagatcagagcaaagagaaaagaaagcataaggacacttactcaacagaagcacctttaggcgaaggaacagaacaatatgtcaatagtatctcagattgaccatttctgttacttgtcatttctactttcagaaactaaatgactttcaaatttgggtatagacaataaagaactgaagtgcccactactcagtgatttggaaattttgatgcttgtataaatgtcagataattaatttccaaaggcgtatgtattaagtaaaagtctgtaaatatgttaatgaggccaatttttccagcatttataattatttttttcacttgttaggaagctttttgntatgtattttctgttaatagtacctgc

SEQ ID NO: 712 - DNA, 505 bp, Homo sapien
  misc_feature (1)...(505): n = A,T,C or G
acacccatggaacaacttatatctttagtaaacaagtgcaacattattgtcagttattttgcatgtttaaatattatagtctgattatttgtaaacaaacaaaaccccaaatactctaaattctattttaaaaatctgtcaacccacaattattctaatatgctttacttactcgaacacaaatttctgaaaggtgcatatattaccttagataataaggtttagaaatgagtgcttcacactatgaaatgtgcatttccgataagtgatttatgcagcataaagtttagatcaagaaattacaaatcctggatccccacagttcatttagaaaatgcctcaaagttatggctcttgcagcaggtttaacagattaaacattaagtgttctagctccctctatttcaagtatcaaagaaatatgaggctcaaaatctctctaggnttgtaactgataatgcaaaagcattngaaaacagttaaatgtgttttgaaatacagtatt

SEQ ID NO: 713 - DNA, 177 bp, Homo sapien
  misc_feature (1)...(177): n = A,T,C or G
aaaatagataaanatatttttttcaggaaatagtgtggtgtttccagtttgatgttgctgggtggttgagtgagtgaatnttcatgtggctgggtgggtttttgcctttttctcttgccctgttcctggtgccttctgatggggctggaatagttnnggtggatggttctacccttt

SEQ ID NO: 714 - DNA, 306 bp, Homo sapien
  misc_feature (1)...(306): n = A,T,C or G
acaagcttttttttttttttttttttttttttttanctctagagggggtgctatagggtaaatacgggccctatttcaaagatttttaggggaattaattctaggacnatgggcatgaaactgtggtttgctccacagatttcagagcattgaccgtagtatacccccggtcgtgtngcggtgaaagtggtttggtttanacgtccgggaattgcatntgtttttaagcctaatgtggggacagctcatgagtgcaagacgtcttgtgatgtaattattatacnaatgggggcttcaatcgggagt

SEQ ID NO: 715 - DNA, 297 bp, Homo sapien
  misc_feature (1)...(297): n = A,T,C or G
atcataatggctattcctagttttattgctatagccattatgattattaatgatgagtattgattggtannattggttatggtctcattgtccggagagtatattgttgaagaggatagctattagaaggattatggatgcggttgcttgcgtgaggaaatacttgatggcagcttctgtggaacgagggtttattttttggttagaactggaataaaagctagcatgtttatttctaggcctactcaggtaaaaaatcagtgcgagcttagcgctgtgatgagtgtgcctgcaaag

SEQ ID NO: 716 - DNA, 439 bp, Homo sapien
acactgttaagaagttgagcttttatcttagaggcagcagaaggtttggagccaaggaatgaaatgatgaggcgtccttcaggtaatgaacttcagctgcagtgtgaaaggggcaggaagactggcagctgtcaaaactggaacagtccagtgagtatgtgcaggcccgggcttgggcagtgacgagggcagggagcacacatcaatttctgcggtagaaccttctagaggaagaccagacagagggtcaacagagttgaaaggagaaaataattgaggatgaggtccaagtttttagtttcagagactaggcatatggttaatatttaggtaggaaattcaggaaaaggagcttgtggggcaggaagggaaggaacggcagcttggggcactctgacatctttaacaagtcttgtaaaggcttactaaatacaacgaa

SEQ ID NO: 717 - DNA, 430 bp, Homo sapien
gctaaggcaaaatacagatgaacatgcacgagtaatgtcttggtgggattatggctatcagatagctggaatggctaatagaactacgttggtggataataacacctggaataacagccacatagcactggtgggaaaagctatgtcttctaatgaaacagcagcctataaaatcatgaggactctagatgtagattatgttttggttatttttggaggggttattggctattctggtgatgatatcaacaaatttctctggatggttaggatagctgaaggagaacatcccaaagacattcgggaaagtgactattttaccccacagggagaattccgtgtagacaaagcaggatcccctactttgttgaattgccttatgtataaaatgtcatactacagatttggagaaatgcagctggattttcgt

SEQ ID NO: 718 - DNA, 174 bp, Homo sapien
  misc_feature (1)...(174): n = A,T,C or G
acacagcatgccgccatggcagcaaagctggaatcagtgagatgtttgaggggcatcaaggaccaatcactggcatccattgtcatgcagctgttggagcagtagacttctcacatctttttgnnacttcatcnnttgactggacagtaaagctttggacaactaagaataaca

SEQ ID NO: 719 - DNA, 589 bp, Homo sapien
  misc_feature (1)...(589): n = A,T,C or G
actcactatgtccagcactgtgctggcagggatagaaatatatcccttgacaaccgaatcttttttgggggttagggggtgattaaaaacttcatacatgaaacaatgaaggattaaaagacagtatacaatcaagtgctaacttgtggagaaatgcatttaggagtgcgatagtgctttagggatttcaagaagggagagatgtatttggagttgttgttgccatttcagtagaactgatctcagggatgaggacagaaccatctacatttgttgcagtcctttggaactgtagactggtgcacataccctctctttcgggaagagatagaaatctttggtttgatactgattagcacagtcctagatttctacagctttggtaggctaccagtgatcatatatacaacttatcgtatatataactaccttgagcagcatgtcccaatgtcgtttttgttttcactgtccctcttttttgagaaataagcaggatgttggccaaagtagggcttgtttncagcaagtagcatcctaacctccgtatcactttcnnggagncaatcttgatctttcaactattatgttg

SEQ ID NO: 720 - DNA, 472 bp, Homo sapien
  misc_feature (1)...(472): n = A,T,C or G
gctatgaacaccacaacagaagagattttttactattatgacacaaacacagggaaagagggcaaactagacattgtaatgcataagatgcaggaaaaagtgcagagcattaactataacccttttgaccagaaactttatgtctataacgatggttaccttctgaattatgatctttctgtcttgcngaagccccagtaagctgtttaggagttagggtgaaagagaaaatgtttgttgaaaaaatagtcttctccacttacttagatatctgcaggggtgtctaaaagtgtgttcattttgcagcaatgtttaggtgcatagttctaccacactagagatctaggacatttgtcttgatttggtgagttctcttgggaatcatctgcctcttcaggcgcattttgcaataaagtctgtctagggtgggattgtnagaggtctangggcactgtgggcctagttgaagcct

SEQ ID NO: 721 - DNA, 292 bp, Homo sapien
  misc_feature (1)...(292): n = A,T,C or G
acttgctacancccctgacaaaaaaaagcagaaattgctagaagaaaacgttagtgctttcaaaacagaatatgatgctgtggctgagaaagctggtaaagtagaagctgaggttaaacgcttacacaataccatcgtagaaatcaataatcataaactcaaggcccaacaagacaaacttgataaaataaataagcaattagatgaatgtgcttctgctattactaaagcccaagtagcaatcaagactgctgacagaaaccttcaaaaggcacaagactctgtcttgcgt

SEQ ID NO: 722 - DNA, 400 bp, Homo sapien
attggagtgctggttggggttgctctgatatagcagccctggtgtagtttcttcatttcaggaagactgacagttgttttgcttcttccttaaagcatttgcaacagctacagtctaaaattgcttctttaccaaggatatttacagaaaagactctgaccagagatcgagaccatcctagccaacatcgtgaaaccccatctctactaaaaatacaaaaatgagctgggcttggtggcgcgcacctgtagtcccagttactcgggaggctgaggcaggagaatcgcttgaacccgggaggtggagattgcagtgagcccagatcgcaccactgcactccagtctggcaacagagcaagactccatctcaaaaagaaaagaaaagaagactctgacctgt

SEQ ID NO: 723 - DNA, 195 bp, Homo sapien; identical to SEQ ID NO: 8

SEQ ID NO: 724 - DNA, 538 bp, Homo sapien
  misc_feature (1)...(538): n = A,T,C or G
acctgaagatttaagagatttttggtagttgctggcatggtccctcgacacttaaagtttatatcacaaaaacaaaactaggttggtttcagctctttagtcctttgttaaaaaccataaatcaaatttggttatttaaaagtgaccttaaaaagtttaaaggaaaatatatatattctatcttcccaataagaaacagatttcatatttatacttaaatggcaaataaatatattttaaagccaagcaagttcctctcctctatacaggctaagaaaacagagttattatatctttattgctgatgatcacatcactcatcaagaactagtttcacaattttaggagacttttttcatgacataatataaaagataagggtctaacttaagtctgagcaggcagaatagagctgtgctcccaacatccctatcacaaacatatgacgaatgaacaacaaaacaactgaatctgtttacatcataaccattgnctatgtgatacacaactgcttgcttttctatgggttaataccacc

SEQ ID NO: 725 - DNA, 563 bp, Homo sapien
acgtatttatgtcctttggtgccttgcacagtaaggcactgttaatgacgtagcagaatagaggaaatgcccacagcaaatagttctagtgacaatttactagacaagttacagtttaataatggtggtggtgattgtttctttcattttattattattatttttttacaataagggtgtagcctttatactccacacacacaaaataaaacaagttacagtttaataatggtggtggtgattgtttctttcattttattattattatttttttacaataagggtgtagcctttatactccacacacacaaaataaaaacaagtgcttattacgaaaagagtccctgcccccaccccccagaacatcctgaacatagcaattcaacagaacagaaaattcaaggcgtttgatttcaaaatttcaataaaaaagcaaaagtatgtaatgcaacagctgttcaacttccaactctaaacaggcaccattaaacaaaaaaccccagtattttaaatttctccagcacacattccaggatcaatgctctgaactgtaatcagctagt

SEQ ID NO: 726 - DNA, 195 bp, Homo sapien; identical to SEQ ID NO: 8

SEQ ID NO: 727 - DNA, 323 bp, Homo sapien
accagactgggacattcctcacatcaaagaacttttaccagaaatgactgtgattcccaagctagcctcaatcatacctctctagtgccctctacggaaaatttttaggaaaactatcttgggaatgtatttttccagtcccagagagtgttaaattggtgagtttggaattcttaggatgctttttctttttaatgagggacaaataaatgccacatatttaaccgtggttaactaggaactgcttgactttgagtttcttttttgttttcttctaaataaaacctggttaaaaaaggagtgctttttcgttgtgcacaagt

SEQ ID NO: 728 - DNA, 320 bp, Homo sapien
actttggaattcttagtcacaaaatatattttgtttacaaaaatttctgtaaaacaggttataacagtgtttaaagtctcagtttcttgcttggggaacttgtgtccctaatgtgtttagattgctagattgctaaggagctgatactttgacagtgtttttagacctgtgttactaaaaaaaagatgaatgtcctgaaaagggtgttgggagggtggttcaacaaagaaacaaagatgttatggtgtttagatttatggttgttaaaaatgtcatctcaagtcaagtcactggtctgtttgcatttgatacatttttgt

SEQ ID NO: 729 - DNA, 276 bp, Homo sapien
cacaaaagtatattttatcaaattgctgtaagctgtggatagcttaaaagaaaaaaagtttcctgaaatctgggaaacaagacatttaaagaatcagcaaaatttcaaataaaaaattatgaaaatattatcctcattagttcatttagtcccatgaaattaattattttctctgcttgatcttggtggacagtttcatgaagctgtcagttagttcattaaagttttggaaattctcagacagtgcagtggtatcagaaacttgtattcaagagt

SEQ ID NO: 730 - DNA, 195 bp, Homo sapien
accattggtggccaattgatttgatggtaagggagggatcgttgacctcgtctgttatgtaaaggatgcgtagggatgggagggcgatgaggactaggatgatggcgggcaggatagttcagacggtttctatttcctgagcgtctgagatgttagtattagttagttttgtcgtgagtgttaggaaaagggcgt

SEQ ID NO: 731 - DNA, 317 bp, Homo sapien
actctgccttttacgagatgaggtaagacatatacatagatggcttttactagccaaggcaatgtaaatggactaagattctcatgtgacttgaggttatctgatgaatttattctcttcaaaaccacctacttttagagggcatgtttaacccctctctttatttaaggagggagagaaaaacacatgttaccagaattcagagtgggttactcaacctaagagaacatacggagttctctttgggaaaacgacaagactacagtgttcacttcgcaccatgaagtggcactcctgttatggctgtcagagtcctc

SEQ ID NO: 732 - DNA, 354 bp, Homo sapien
  misc_feature (1)...(354): n = A,T,C or G
acttatcagaagcctacttcaggaagacagggaagcgatccaaggccaatatcattttcaacacttctcttggagccattttcggggttaagaagtatgcagatgccctgcaggagatcatccaggagcggaacctcactgttaactacaagaaaaacctcattgaagtccgagccgatnaacaagaggctgtatttgagaacctggacaaaccaggagagacccaagtgatttcatatgaaatccttcatgtcacacctccaatgagcccaccagatgtcctcaagaccagtcctgtggctgatgctgctggttgggtggatgtggataaagaaactctgcaacacaggaggt

SEQ ID NO: 733 - DNA, 312 bp, Homo sapien
  misc_feature (1)...(312): n = A,T,C or G
acaaaaatagcaattaatttgtaaacactgccagaatactttctagctgctttgtaattttttaagagtgttattttgtttttgtttttctgtnnctttgtatgtggctcttgttttcatttttgttgtatgtgtagatctgtaaataaaattgcagtatttaaagcttaagctttcaggaaaaagaaaataagaattcagtgtgtgcatgacaactcgtgtgtatgagaaggagggatatgaaggaagatggcttgcagagtaagtcgggtggcaattgtcagggtgtgggaatttcttttcctacggggt

SEQ ID NO: 734 - DNA, 546 bp, Homo sapien
  misc_feature (1)...(546): n = A,T,C or G
acagctaggctcancagcaaaagtgaagaataagaatgaaaggtgaaaagctgacagatgccacgcagagcaaggacttccatgaaggtccgtgtcctgtgtgccaaacacagtcaacattccatcattttctcattgctcttaaacgagcaaaaccaaattctttttctatttaaagaaatattaaatctttattttccccaacataatttgtgatcaggtaaggcaaagataagtccaccatcactggggacagcagcaacatacagacttcagaaatagccctgaatcatcagtaacattctatcgtggtaacatcagaaggaatgcagctaacaaattaaatttgtaatgttgtcacattattctaatttatttgattagtttatctggaaaaactttataaatacattatgtaagagggcagtaaattattttcttgctttgaaaaaataatgttttttcacattttaaaacattttagtctgcttttgcaaaaggagttgcaagaaaaatgtgacagctgggtttgcagaatgtccatgt

SEQ ID NO: 735 - DNA, 469 bp, Homo sapien
  misc_feature (1)...(469): n = A,T,C or G
acctgtgggtttattacctatgggtttatatcctcaaatacgacattctagtcaaagtcttggtaatataaccaatgttttcaaatgtattctgtcatacaaagagcagatttttattgaacttgtgcaataactatattaccatacaatataaatattcatgaatagtttcccaagtctggnncgaccacatagggagaaaatgtaaatgtctcaatttttgttcacaaaagtatattttatcaaattgctgtaagctgtggatagcttaaaagaaaaaaagtttcctgaaatctgggaaacaagacatttaaagaatcagcaaaatttcaaataaaaaattatgaaaatattatcctcattagttcatttagtcccatgaaattaattattttctctgcttgatcttgggtggacagtttcatgaagctgtcagttagttcattaaagttttggaaattctcagaca

SEQ ID NO: 736 - DNA, 275 bp, Homo sapien
  misc_feature (1)...(275): n = A,T,C or G
ccccagttcatggtannntgttacagcaatcctaggaagctaatactctgacagaaaaaatcttggataatatgcatgagaaaaatccttcaataaacacaaaattggtttcaaaatgttttcatgtaaaaataaattaacttttctgtaattagattgngttttatagtaattcttgcctgcttcttagtctttgttgtaggatgcataataaaatacatgaatgagttttaaatggttagctttggagaatggttttgggaagttcctacagt

SEQ ID NO: 737 - DNA, 363 bp, Homo sapien
acaccctgcccccatcccaggaggagatgaccaagaaccaggtcagcctgacctgcctggtcaaaggcttctaccccagcgacatcgccgtggagtgggagagcaatgggcagccggagaacaactacaagaccacgcctcccgtgctggactccgacggctccttcttcctctacagcaggctaaccgtggacaagagcaggtggcaggaggggaatgtcttctcatgctccgtgatgcatgaggctctgcacaaccactacacacagaagagcctctccctgtctctgggtaaatgagtgccagggccggcaagcccccgctccccgggctctcggggtcgcgcgaggatgcttggcacgt

SEQ ID NO: 738 - DNA, 130 bp, Homo sapien
  misc_feature (1)...(130): n = A,T,C or G
gcttttttttttttttttttttttttttttttaagctttaaaaaaatctttattctttcaatttaaaataatgaatcaagtgcctgctatgtgttanatattatattacatcttaggaattcaaagtggt

SEQ ID NO: 739 - DNA, 195 bp, Homo sapien; identical to SEQ ID NO: 8

SEQ ID NO: 740 - DNA, 241 bp, Homo sapien
accctgactgcactacagtggtttatctatgactccgtgaaggtctacttcagacttcctcgccctcctccacccgagatgccagagtctctgaagaagaagcttgggttaactcagtagttagatcaaagcaaatgtggactgaatctgcttgttgatcagtgttgaagaaagtgcaaaaggaacttttatatatttgacagtgtaggaaattgtctattcctgatataattactgtagt

SEQ ID NO: 741 - DNA, 416 bp, Homo sapien
acatttttgttacagacagaaggctgattttggaaagaaagaaacaataggatgtatagtgctttctatcagcagactagtatgtttaaaaatagtctcatcaagggttctgaataagaaatataaatgttgccaggcagtcccaaactcacatttgatattaactgcagactcatttaaaactgaaaactgctccagcctctctcaatctttactaaggactgggagattatcaaaccctttcaagtctaataatgcttttgaattaagattattgaaaaaaggaatctctgttacagtgcaaagaacattttgatagaaattcatgtctacaaaggagttaaatacagatgtcccttacattagcagatactattcttgctctaaaaaggtagaattatcaagacattgtaaat

SEQ ID NO: 742 - DNA, 235 bp, Homo sapien
  misc_feature (1)...(235): n = A,T,C or G
ttttttttttttnnntttggctctagagggggtgctatagggtaaatacgggccctatttcaaagatttttaggggaattaattctaggacgatgggcatgaaactgtggtttgctccacagatttcagagcattgaccgtagtatacccccggtcgtgtagcggngaaagtggtttggtttanacntccgggaattgcatctgtttttaagcctaatgtggggacagctcatga

SEQ ID NO: 743 - DNA, 225 bp, Homo sapien
acgttctaattgagagcattccagtagtatcaaacaataatgtctactgtttatagtccacttaataaaaatagaggcatttactatttgccttaggctgataggaatgtgggttttcttgaccaaatatatcagcatctaattgaaatgaccaaatagcattcttagacttctgtattatgaatataattgatatttaaattaatgtcttgttcacatatgtgt

SEQ ID NO: 744 - DNA, 283 bp, Homo sapien
  misc_feature (1)...(283): n = A,T,C or G
gtaatttttgcctttgtttaagcctggaacttgtaagaaaatgaaaatttaatttttttttctaggacgagctatagaaaagctattgagagtatctagttaatcagtgcagtagttggaaaccttgctggtgtatgtgatgtgcttctgtgcttttgaatgactttatcatctagtctttgtctatttttcctttgatgttcaagtcctagtctataggattggcagtttaaatgctttactcccccttttaaaataaatgattaaaatgtgctttaanaaa

SEQ ID NO: 745 - DNA, 351 bp, Homo sapien
  misc_feature (1)...(351): n = A,T,C or G
accctagtaacangtcatatcacgatcaataaatgatcacagcctttcgaaaaaactactgagattggagaatgggtttctgtctccaacccctgaaagacgttgctgcttcaagacctacagctccaagaagacaactcagaatttcttacttttaaaaaaatattgtcatgaataactgaataattagatttctaggaaaatgaggcttttaaattaagatttagcaaaatcaactataatgtatttacttctactcattgatgaatgacagaaatcagttaaagttttacatacaaaagatataaatactgcataatacgtagtgaatattggtacaaaccctttcgt

SEQ ID NO: 746 - DNA, 453 bp, Homo sapien
  misc_feature (1)...(453): n = A,T,C or G
acctgtgggtttatnacctatgggtttatatcctcaaatacgacattctagtcaaagtcttggtaatataaccaatgttttcaaatgtattctgtcatacaaagagcagatttttattgaacttgtgcaataactatattaccatacaatataaatattcatgaatagtttcccaagtctggagcgaccacatagggagaaaatgtaaatgtctcaatttttgttcacaaaagtatattttatcaaattgctgtaagctgtggatagcttaaaagaaaaaaaaaagtttcctgaaatctgggaaacaagacatttaaagaatcagcaaaatttcaaatnnaaaattatgaaaatattatcctcattagttcatttagtcccatgaaattaattattttctctgcttgatcttggttggacngtttcatgaagctgtcagttagttcattaaag

SEQ ID NO: 747 - DNA, 442 bp, Homo sapien
  misc_feature (1)...(442): n = A,T,C or G
gcctgtgggtttattacctatgggtttatatcctcaaatacgacattctagtcaaagtcttggtaatataaccaatgttttcaaatgtattctgtcatacaaagagcagatttttattgaacttgtgcaataactatattaccatacaatataaatattcatgaatagtttcccaagtctggagcgaccacatagggagaaaatgtaaatgtctcaatttttgttcacaaaagtatattttatcaaattgctgtnagctgtggatagcttaaaagaaaaaaagtttnctgaaatctgggaaacaagacatttaaagaatcagcaaaaattttcaaataaaaaattatgaaaatattatcctcattagttcatttagtcccatgaaattaatttatttttctctggcttgatcttggtggacaggtttccatgaaggctgtca

SEQ ID NO: 748 - DNA, 399 bp, Homo sapien
acatttaaggcttttaaatgtggaaaaaaaattaaaaccaaagaacccccaaatccaaacccctaaccaacacaagtagtatagcaatgttaagcatctcctatttctgatgcttatttggcgcaacttccagtgtcaaaacccaaataattcctaaactaaaaagattagtttagtgaaattttaattacataaattcttcaaagcataaacttggaatttttgtcttggaaatgttataaaatttttaatagcaaaacataggaataaaaacatattaacaaaatgtattcaatcatttacattacaaacaaggaatctgcagttcattgttgtggcctgacaaaagaaatcatatctaccattaagaatctatgcacaatgtgattgcaaatatgt

SEQ ID NO: 749 - DNA, 441 bp, Homo sapien
  misc_feature (1)...(441): n = A,T,C or G
actggggttcttttannccccgtaggtctgtagaatattttaaaaggctagaattacctcaaaaatagtcttgaaataatactgagtccttctaaagagctcactggatattttaataacatttacagaaagacaaaatttgcagtagctgagtttaagtgaagaataatgtagaactaacgtgggctaaaatgtttcataattaacgtcaaaaattgccaagattattaatatatattttggtaatcactattgaccaggttaatttttttgtgcaaaatacactatgtattaatagaacaggaaaataattatttcagaccactaacaanaagaaaacccacagcaagagaagcatctgtagggcaattaaacgttagggaagtttactagctttagaatacatcaatatacttcgataaacaaggagtgttttaatgt

SEQ ID NO: 750 - DNA, 175 bp, Homo sapien
  misc_feature (1)...(175): n = A,T,C or G
actgtctgggtatcggaaagcaagcctacgttgctcactattacgtataatccttttcttttcaagatgcctgaggaagtgcaccatggagaggaggaggtggagacttttgcctttcaggcagaaattgcccaactcatgtccctnatcatcaataccttctattccaacaagg

SEQ ID NO: 751 - DNA, 547 bp, Homo sapien
  misc_feature (1)...(547): n = A,T,C or G
ttgataaggaattctcnnaccgataggatgtctgtctgggctttgctgcgggacagtctaactgtgggggctaggggaaagcaggagagtatcgatcaaagagtaagccacacacggataatcagttactagggatggaggtgtgagggttcattatattattcattttactgttgtatatgtttgaaaatgtctataataaaaagctntannaaaaaaaanngaaacaaaaatagttcaggccancaatgggccctccatgttcagtggattttatccttgtttcaattggggtangagttccaggaggtgtggattggaggttgtctaaagaatngaactggcctttntncctgnttcctgggagggagactttnannccttgacatttccagggtaataggagtgnctttgttatttgtgaggccatgggatcacacctgagcttatgctaaaaggtgggatgactcannagctggggctggtcaccagacagactgaccatgtgattagaggtttgaggctttgagtcancctgacctatggg

SEQ ID NO: 752 - DNA, 222 bp, Homo sapien
accccagtcgtatcctctgtccgcatgtgtggccaggcctgacaaacacctgcagatggctgctgccccaacctgggacctgcccaggaggttggagcagaaagggctctccctggggtggtgtttctcctctagggtattgggatgcatgttctgcactgccagcagagagggtgtgtctgggggccaccacctatgggacacggggtcgaaggggcctgt

SEQ ID NO: 753 - DNA, 578 bp, Homo sapien
  misc_feature (1)...(578): n = A,T,C or G
acatgtcttccatgtatcttttgaactggcaattgnntatttatcttttatttttttaagtcagtatggtctaacactggcatgttcaaagccacattatttctagtccaaaattacaagtaatcaagggtcattatgagttaggcattaatgtttctatctgattttgtgcaaaagcttcaaattaaaacagctgcattagaaaaagaggcgcttctcccctcccctacacctaaaggtgtatttaaactatcttgtgtgattaacttatttagagatgctgtaacttaaaataggggatatttaaggtagcttcagctagcttttaggaaaatcactttgtctaactcagaattatttttaaaaagaaatctggtcttgttagaaaacaaaattttattttgtgctcatttaagtttcaaacttactattttgacagttattttgataacaatgacactagaaaacttgactccatttcatcattgtttctgcatgaatatcatacaantcagttagtttttangtcaagggcttactatttctgggntcttttgctactaaggttcacattanaa

SEQ ID NO: 754 - DNA, 306 bp, Homo sapien
acacaatggtttattaaaggaatgtatggcccacatcaacctagcaaggattctactggtaaaccttcccatggccaaaggaaaaacaagcaggagttgagtggctggggtggggtgcaggcaatggagagagggcagaagggtgtagaagctgaagggggctagaagcttactcctgagtttcttccttctgtcttcaaatctttacttcttatggccaaagacccagctgtttcataggctggagatgcactcttctagactgctcaagacagccagagacaggggaggagggaagaaggatac

SEQ ID NO: 755 - DNA, 281 bp, Homo sapien
  misc_feature (1)...(281): n = A,T,C or G
acactttccaacaggcanaccctaccaggaactgggagacaagagcgggctctctcctgagataagacaagtttaacgtgaagaccttttggaaaattcccgggttttcctggctcttttcagttggtgtttctctgaggaatagggaggttctcatgaagatattttaaacttccatgctctgagaaatctgagaccacgtggtccttccctcgcagcagccacttagtagtaagcagtccctcaagtcctactggtccccgggcgtggattctcgatgt

SEQ ID NO: 756 - DNA, 205 bp, Homo sapien
acatctctacaatagaatactactcagcaatgaaaaggaacaaactgctgatacacacaacagcatggatgaattacaaaggcattatggtgagtaaaagaggccagtctcaaaagagtatatttagtaggaccaaaactggatttggtagaaatcacatcagtggttgcttctaggagctaggggagacgaagtggaagggggt

SEQ ID NO: 757 - DNA, 490 bp, Homo sapien
actgaccatcagaattaaaagaaaaggctggtctcagcagctcacacctgtaatcacagcactttgggaggccaaaaggactgcttgagcccaagagttcaagaccagcctgggcaacaaagtgcgaccccatctctacaaaataataatcataatagaaagaaaagaacggcttatgagagcttgggcaatacctgttggaaaggagcgaaggggaaagacttagtgccagcagagaactactacatactaaatcctaaaagcttaatatttccaagttaagcctatattaactgtgagaatgtttaaaatgtaaatgttatactaaaacgtggtatcttaaaactctaaaactattagttcccaagcttctgttctatttcctaactcttaaaaaaaaagaggatttaaaaaactgtattacttctatttttcctgtttttctaattcttctattttaaaaatgacctttacccataataaaccataa

SEQ ID NO: 758 - DNA, 410 bp, Homo sapien
ccggactcccgtcccggctcatcacccggcctgtggcccactcccaccgccagctggaaccctggggactacgacgtccctcaaaccttgcttctaggagataaaaagaacatccagtcatggataaaaatgagctggttcagaaggccaaactggccgagcaggctgagcgatatgatgacatggcagcctgcatgaagtctgtaactgagcaaggagctgaattatccaatgaggagaggaatcttctctcagttgcttataaaaatgttgtaggagcccgtaggtcatcttggagggtcgtctcaagtattgaacaaaagacggaaggtgctgagaaaaaaacagcagatggctcgagaatacagagagaaaattgagacggagctaagagatatctgcaatgatgt

SEQ ID NO: 759 - DNA, 440 bp, Homo sapien
  misc_feature (1)...(440): n = A,T,C or G
ctttgatttgtgctgagggtcagcttttggctccttcttcctgagacagtggaaacaatgccagctctgtggcttctgccctggggatgggccgggttggggggtgggttggtgaggctttgggtgccactgcctgtgggttgctggcttaaaggacaattctcttcattggtgagagcccaggccattaacacctacacagtgttattgaaagaagagaggtgggggtggaggggaattagtctgccccagctagagggagataaagagggctagttagnttcttggagcagctgcttttgaggagaaaatatatagnctttggacacgaggaagatctagaaaatttatcattgaacatattaatggttatttctttttctttgggatttccagaaaagcctcttaattttatggcttttctcatcgaagtaaatgtt

SEQ ID NO: 760 - DNA, 508 bp, Homo sapien
acctgtgggtttattacctatgggtttatatcctcaaatacgacattctagtcaaagtcttggtaatataaccaatgttttcaaatgtattctgttatacaaagagcagatttttattgaacttgtgcaataactatattaccatacaatataaatattcatgaatagtttcccaagtctggagcgaccacatagggagaaaatgtaaatgtctcaatttttgttcacaaaagtatattttatcaaattgctgtaagctgtggatagcttaaaagaaaaaaagtttcctgaaatctgggaaacaagacatttaaagaatcagcaaaatttcaaataaaaaattatgaaaatattatcctcattagttcatttagtcccatgaaattaattattttctctgcttgatcttggtggacagtttcatgaagctgtcagttagttcattaaagttttggaaattctcaggacagtgcagtggtatcagaaacttgtattcaagagtacctcg

SEQ ID NO: 761 - DNA, 537 bp, Homo sapien
  misc_feature (1)...(537): n = A,T,C or G
acaccgtcatatctcaaaagttcagtgctggccatcttgcatcaaatgttcttaaggcagtgactggctatcaaccacagtttctgtctccccagttgcaaacacaggatccatgcaacagttctgagaccatacacttagaaaccacaggggatgcggatcaaatgcagaactcccaaattataaaacagtcaggctacactcaaaacaaaacatagaacatnnacaacacacatctcccaaaaaagaagtgcaacgcatgcttgtataaaccaacaataacaaaaaaaccacaataaaaaatgcagagtctcccaaacaagttttcaaatgtattgcagaaggaaaaaaaatgtatatatataaaattaaaaagtctgaaatactagtgcataggtcaattacctaacaccaaggtttcttttctttctgtccaagctctactgcccctctgatactagcagcatgtctacaggctaagaccatagcaggcaaaaaacgttttttcatttgggcatttacaaaattaaattactg

SEQ ID NO: 762 - DNA, 284 bp, Homo sapien
actaataaatatttatagatgagtgaatgaggaaataattacatcaaaaaggtcagtgacaattgataaatgacaaggaaatatttaattaggtaaaactaaatcattgctctctatactaggatagactttatctacttcatctgttcctaagtcagcatgttagttctggggaaggatcataagaaaggaaatactttttaaaaaaaaatttggaaacatgtaacaaagcaagggtaaaatatatatatatatctatataagtgctgtgactgtaaaagtgt

SEQ ID NO: 763 - DNA, 209 bp, Homo sapien
accttagtagggcagatataggaaaaacaaattagagcaaaacaaatcctctacaaatccaaggcaggaaaagtggtggcagagtgactcattctcctgtccctcccatcaggtcaaatcaggaggctgcagtgaatgcctgttctttgaatgtgtagcagttgttcctgtaactctttaaaacttggctataggctgtttagcacagt

SEQ ID NO: 764 - DNA, 480 bp, Homo sapien
  misc_feature (1)...(480): n = A,T,C or G
actccatcttanntaaatatgattaatatccactttaattatttgtgatggagatggttagaatagggcatagcagcaggggtctattccactaacattatacctggctgggtgcctgtaatcccagctaccaggtaggctgaggcaggaggatcacttgagaccagttcaagtccagtctatacaacagaaagagacctcatctcttaaccccaacccccaaaaaagactgtctgaatagaattttgatgaaaaattgtaaatttcacatttttatagatttttaaacaccaagcaatgactttaaacagtgattttagtatttccactgcatattcattcctccattctgtttttaattaaaattagccacaatgtttangaaaacaactgtttttccactttaaaaaaaccaactaggcctggtgtggtggctcatgcctgtaatcccacccancactttgggagagaatatctaaa

SEQ ID NO: 765 - DNA, 195 bp, Homo sapien; identical to SEQ ID NO: 8

SEQ ID NO: 766 - DNA, 411 bp, Homo sapien
acagctgcccaagggcgttcgtaacgggaatgccgaagcgtgggaaaaagggagcggtggcggaagacggggatgagctcaggacagagccagaggccaagaagagtaagacggccgcaaagaaaaatgacaaagaggcagcaggagagggcccagccctgtatgaggaccccccagatcagaaaacctcacccagtggcaaacctgccacactcaagatctgctcttggaatgtggatgggcttcgagcctggattaagaagaaaggattagattgggtaaaggaagaagccccagatatactgtgccttcaagagaccaaatgttcagagaacaaactaccagctgaacttcaggagctgcctggactctctcatcaatactggtcagctccttcggacaaggaagggt

SEQ ID NO: 767 - DNA, 195 bp, Homo sapien; identical to SEQ ID NO: 8

SEQ ID NO: 768 - DNA, 178 bp, Homo sapien
aaaaagtgcagtagaggaaaaagaggagccaaagaatacttcatagaagtgggacctgagttgagctttgaaaggtgatggttgtgtcagaaacagtgttcaaagaacattattaagatccatagtggtgtgtttttatttctaaaattccattggtataattcacacatcacagtct

SEQ ID NO: 769 - DNA, 86 bp, Homo sapien
  misc_feature (1)...(86): n = A,T,C or G
accattggtggccaattgatttgatggtaagggagggatcgttgacctcgtctgttatgtaaaggatgcngtagggatgggagggc

SEQ ID NO: 770 - DNA, 574 bp, Homo sapien
  misc_feature (1)...(574): n = A,T,C or G
acctcttagggtgggagaaatggtgaagagttgttcctacaacttgctaacctagtggacagggtagtagattagcatcatccggatagatgtgaagaggacggctgtttggataataattaaggataaaatttggccagttgacagattctgtttccagcagtttttacagcaacagtggagtgcttcagtattgtgttcctgtaaatttaattttgatccgcaatcatttggtatacaatgctgtttgaagttttgtcctattggaaaagtcttgtgttgcaggggtgcagttaagatctttgtgatgaggaatgggatgggctaattttttgccgttttcttggaattgggggcatggcaaatacagtagggtagtttagttctctacacaggaacatgataaactacacctgttgatgtcaccgtctgtcaatgaatattatagaaggtatgaaggtgtaattaccataataacaaaacaccctgtctttagggctgacctttcgncctttgacctcctcagcctccattcccatcttcgctcagactgcaagtatgtttgtattaatgt

SEQ ID NO: 771 - DNA, 530 bp, Homo sapien
  misc_feature (1)...(530): n = A,T,C or G
acagttatttgtcaagcttagctttgatttcaaaggacacgcttaccttgtctggcataagaattaatgctcatgtctgcagtggttgggtaggtcctgcttaggagaattaaaaaattcctctttccgtttggttgaatgttgcagtcaggaaccccaactcacttggaatgtttttatatgtaatcatttcccttgaagcttatactttataagggaagaaagaattcaggtgatatgggaaaactgcttggcagaccttcatcttctgcctcaactgtaaaccacatgtaaatgcttaatggagactgttttcattcttgtgatatttaacattcagaaaattacttcagctttggaaatactcaggctgtttttattctgcaggtaagtgttttgacttaattactaatattccagaaatttttgaaagcagtaaccttaatttcctatgtatttcattccacttttgcatataggtcaaatagcaatgngtatgcacattctctttagttaaggcaccaattgtt

SEQ ID NO: 772 - DNA, 331 bp, Homo sapien
atcttggctcccggcaagatggcgccactgcactgcagcctgggtgagagcgagactccgtctcaaaaaaactaaaaaaaataaaaaataaatagagagggatttttttttaagtagctttgtgttttgtggctattgcatctggaagataaaaattgatgtaaagtgttatacacttcttgttgcgcagtagtgctagcggcttcgctgttcggtcctcggaccggcagccgccactggtgttgagctgctaggaagcccctatcggcgagctcgttggagctcgaacccattgtcacccctctgactcaccggcaaaaaaaaaaaaaaa

SEQ ID NO: 773 - DNA, 527 bp, Homo sapien
acacttttgttacagttacatatatgaatagttagcagaggagaaactcctccgttgttcctacaccaagggaaaaaatgtaaggactgtatagctcatgaagaatattaacatttttctatcacaaaatattgataaaattggaattgtatcaattcatgttatggagcttaacattttagccgaaatattaagataatataaataaggcttttagcttcatatcaagacctatttgaacacttctagaaaagaacattaaaagttttttcctcatttatggtttgatttagtgtagtgcctcaactgttcttaatggtgtcttagtataatgcataattattagaatataattataaggcattacagaattttatgtggatacttgcaaagatatttcagtccaaaacttcaaattacacacccaaatatgtttgttgccttaatctatacttggacaaaggcaacattttaatttttgctaagtcttaactttagccagatggattgaaatttaaaattttcat

SEQ ID NO: 774 - DNA, 295 bp, Homo sapien
actctgagccttctcctcgggttggtctaggtggatatcttctcctgaccaaaaactgataggagtcaaatattttcacggtcaaagcagcttctgcttttctaccaaggctcttccaaaacttctgggaatggataacgatgttttctggttctacttcaccctgagcacaagggaacctggtccttgaatgaacctgcactcaaaaaatcaaactaaacaccggatagtttagattggcataaatgcaaatcagagtgttgggctttgcttgtatttgctgacatgctatagt

SEQ ID NO: 775 - DNA, 195 bp, Homo sapien; identical to SEQ ID NO: 8

SEQ ID NO: 776 - DNA, 262 bp, Homo sapien
  misc_feature (1)...(262): n = A,T,C or G
gggcaggtcttttttttttttttttttttttttttttttttactttttttttggccgcaaaccacaagtgtttattgcanaaatctggccaacattccaattgcagggccccancacagggctgggcaggtganatagggaggggtggaggaagtaatctggcccagggcctcanagctgngaaatgatattgggtgccaggctgcaggtgaggcctgtgccatntggttccacattcagggccttcactatgccatcctgt

SEQ ID NO: 777 - DNA, 267 bp, Homo sapien
actatctgtgaagttacactttttttttttttttaaaggtagagatgtgtgtgtgtgtaggtattaaagatgtgttgttggtttccaaaaaggaacactggaaaataaattttgaatgtttatgttctcagaatcaggttgacagtcccttgctgacatggctttgctttgtgtaaatacagtggatctcaatcttcggggtgtgatgaatagcgaatcatctcaaatccttgagcactcagtctagtgaagatgttgtcattatgt

SEQ ID NO: 778 - DNA, 452 bp, Homo sapien
  misc_feature (1)...(452): n = A,T,C or G
accattcacatcctcaaaaattcccaactcttagaaattatcatatattggcaagttcatatgattcaacctaatagcttctacctcacaggattattgtgagaattaaatgagaaatgcatgaaatgtttggcacacaggctcatagtaagtgctcaataaatggtggatattattattcttaaatgaatcatgtaattattttctatataataatcaaactcaatcccacttatttgcaacttctgtatcaagttttaagtccaatctatttactggaatacaatgatttagcacacattgatttttcccataaacattcatatgcaatgattgctcactaaaatgcaaaaagggtgaggatacaatatgtgtttttattgtttttggatttngcttctttcacttagcatgtttttcgaaagttcatctctgttatagcatgtatcagt

SEQ ID NO: 779 - DNA, 175 bp, Homo sapien
  misc_feature (1)...(175): n = A,T,C or G
caagcttttttttttttttttttttttttttggctctagagggggtgctatagggtaaatacgggccctatttcaaagatttttaggggaattaattctaggacgatgggcatgaaactgtggtttgctccacagatttcanagcattgaccgtagtatacccccggtcgtgtag

SEQ ID NO: 780 - DNA, 152 bp, Homo sapien
acggatgctacttgtccaatgatggtaaaagggtagcttactggttgtcctccgattcaggttagaatgaggaggtctgcggctaggagtcaataaagtgattggcttagtgggcgaaatgttatgctttgttgtttggatatatggaggat

SEQ ID NO: 781 - DNA, 557 bp, Homo sapien
  misc_feature (1)...(557): n = A,T,C or G
acactgtggtagcatagagtgtggcttgtggcctgtgactttcanngttgtggttaatcttattgctaaaatgcaaacattggctttttttttccccctcaaagtcagcctangtcaggggagcaagctgcanaactgggtaatgtaagttcaaatgatgaggtgatggaagggctctaggacaaggacattccagagcagagggatgtggacagacaagcagaaggttgtctggaggaatccggaggggaagtcctgatgaaagactttgtgtggtccttcataaggctgttgggtgttcagggaaagaaggccgagccatcctactgagctgcacagagagggcatagagcagccctctgggactgagccattagcagtgtgcagactctttgtgtgtagccagagaaaaccatccggagttcctagggcatatttttctgtcctgattgttttgttttgnttttttttnccaccacagaaggtgctgattttaccatatctttttcatcttttcaaaagttttaaaatatagaacatggggtttctcnctaaga

SEQ ID NO: 782 - DNA, 500 bp, Homo sapien
  misc_feature (1)...(500): n = A,T,C or G
actaaaaatatacaagtattgtgctgggtattttggcacctaatcttcctaaatttcttatgtattgataagattctggcatgggaatagatttaacaagtcataactcaatactgcatgatttggggaaaggtcaattgatacaaatgacaagcacattttatatgctgacagcaagaatcttttgccaagtatccaaataggttgactgtaacccaaatacagaggttgccaaatctgtctagcttgaggcctggtaaaactgcctttcaatactcctatggaagcttcattagacttactaagccaacatgttggctaatatgtataacaaattaggccctatctcaagttccacttccagtagcattaggcaccccaattttattgaatgcaacagttgtttctatgaccgttggaatctttgaaacgcagccgcattttangacgatacttctccaaatacagaagttgcttgctgttaaaagctccacgccgct

SEQ ID NO: 783 - DNA, 603 bp, Homo sapien
  misc_feature (1)...(603): n = A,T,C or G
actcctggcagccagctgtggcccgtgaactgacttctaccgtctgtgaagcctcagaccctcgctgcatgccctatagccttgagtcgcagccagagagccagccctgcttgttgtcttggaggccagtgctactggagagattgtgtctttgcttggcctggaaccagatgtttggaggctttatttagcctctcaactctgtggaggaccaggcctgagctggccacgccttatctctagacactgttcctaccagagtgacctgacgtctttggtttggcggcttcaagctgccacactgtcagcctagcagattgtgcaggatgctgaggataaacgaacccaccaggactgcatttcacaagttctggctgggaggaagtgaggacaggcagcttcccggtgctggagacaggtaggcagcgtggcagaggctgtgggacctggaactctttagagaactcgctccggagcattctaggcatgtgggcacctctccttcaccttcgtattccccagtgcctggctccccngtgggaatgggtgagtgagtggtgagcctggttttttgatgagacaagagacgccctgcaaagactg

SEQ ID NO: 784 - DNA, 382 bp, Homo sapien
acctctttgcatggtgggtgggaaaatagtaaatactgtaaatactttgtgttgcctctgtggtagaaccttgatataaagatctacaaatggacagggcagaggccactaattccttgaccttgaggtgagcctctccccagcgaccaaaatgtgaggacagttaataccttacttgatacaccgtgaaagggacgaaaagtgaccacagcagttctgagacccaggaggcatctgacaccgtctgaggggagggcatgagatgaggcctaagccagggccagggatgggaaatttccccttcaagccccagagattccctgttcaacacacactcaccacagagaccaggggtctctgaacttgcagggtaagaggttgt

SEQ ID NO: 785 - DNA, 394 bp, Homo sapien
acaagcatctgagtgctttacaaattcaaatgtatttaatccccctatcaacactaggaggtagtttctgttattagcgccattttacaaatgaggaaactgaggtgtagagcagttagattggtgtagagaagctagatcgtgtgctcaaggcttcagtccaggctcttggccctgacacgatgctgtttgcctgttgaagatgtgtgtgcatgcatgcaccattcacactgtgaacgtgtcccagcatggccacaccccctcaccgtatacacatatggccatgagcactcaatctcaaggtcatggatgcacatgcctcacacctatgcatggaaggacactcggcacacatacttgtctctgcacacacacaccacttgcacacccatgt

SEQ ID NO: 786 - DNA, 200 bp, Homo sapien
caggtaccattggtggccaattgatttgatggtaagggagggatcgttgacctcgtctgttatgtaaaggatgcgtagggatgggagggcgatgaggactaggatgatggcgggcaggatagttcagacggtttctatttcctgagcgtctgagatgttagtattagttagttttgttgtgagtgttaggaaaagggcgt

SEQ ID NO: 787 - DNA, 249 bp, Homo sapien
acaggagatacggcttatctttgttctcccccatgccacagtaggccccagtagagttcctggggtagaggacttgccgggggtctccatacaaccaggccacaatccccaccacgatgtaacctagaatgaagagcaggaagaggacgcagcagatgacatctgtgcagcttctgttcttgatggggcctcgaaaggaggggtcgtatttgactggcttcccgtaggcctcgtcatcctcgtcccgct

SEQ ID NO: 788 - DNA, 516 bp, Homo sapien
  misc_feature (1)...(516): n = A,T,C or G
aaaaactacacattctcagaagctcttgatgtctctaatgaagggggggaatgctgttaatgagaacagtcataaatttttagcatataattacaagaacagcctgtggatatgatcacttaaatgattttgtggtgattcgtgccattgcttttttatttaaaagaaaattttgtaattaaatgcctttttctaaattatcttctcttggaatcattacttttaatcctatgtgtttatgagtatttttgctttttttttattaatattgagaaatggacttttttgttattaaaagtcacctctattttctattttctttgtaatttttaaagtaggaagatgtcagagatgtaaatatgttttcgtctttagtttttttccttttacaaatttttattcttcangattttcaaaatacagttttagttctgnttcttttgacaatatgntattaattttccaattngcaaaatggtacatggtggttgccgcccgacagcaccgtgttggcgt

SEQ ID NO: 789 - DNA, 179 bp, Homo sapien
acagtggggaggtggaaggagagtcagaagtcaccaaaatgtataactatccaagctcaagagcagctgggctgagtctccactcacctctttctctgtattactcccataaccattactaatgtgtccactttctttactgacacaggtgctgggactgggggtggtgaaggatatgt

SEQ ID NO: 790 - DNA, 198 bp, Homo sapien
  misc_feature (1)...(198): n = A,T,C or G
gcggcgggctctgganaagattgaccttaagttcattgacaccacctccaagtttggccatggccgcttccagaccatggaggagaagaaagcattcatgggaccactgaagaaagaccgaattgcaaaggaagaaggagcttaatgccaggaacagattttgcagttggtggggtctcaataaaagttattttccac

SEQ ID NO: 791 - DNA, 164 bp, Homo sapien
acctggccctcttttccattattaatattgttttgttttattgttcattgcagaaattgaagtattaaaatatcttattataataatattgctttctatttgttgctttaattctgtcaatttttgctttgtattttaggaaacctaatatgagaaatatatgt

SEQ ID NO: 792 - DNA, 464 bp, Homo sapien
  misc_feature (1)...(464): n = A,T,C or G
actttggtaaataaaaaataaaatggttcagatgaacacaatccgtggaaagaaacaatctagggggaaggaactatggacatcagacaatggtcacaattctcaccatcgagctccatagataaggcaagacttgctaagtctatggatcacgaccccatggaggtcttaagtatctccagactgaagctagaacaagtatagtgcaattagaaagagagaaagcccctcctccacggatacatccacccctctgtaaaggagactgacgcatgccaacacttctacatgggaaaggggagccccggggtgtgacgtctgactcctggcccttttcttctttcctctgagcttagtgctggtggaggctctggaagaggcactggggaggccaagggcccttcctactatgaaaaatgaactgtnagagtgggaaaatgtgtgaagcctcttaccagtacctc

SEQ ID NO: 793 - DNA, 558 bp, Homo sapien
  misc_feature (1)...(558): n = A,T,C or G
acaggggaatggaatggaatggaatgcaatggaatggaatcatccgtaatggaatggaaaggaatggaatggaatggaatggaatggaatggaatggaatggaatcaactcgattgcaatcgaatggaatggaatggaattaacccgaatagaatggaatggaatggaatggaacggaacggaatggaatggaatggaatggaatggaacggaatggaatggaatggaatggaatggtatcaacgcgagtgcaggggaaaggaaaggaatggaatgcaatggaatggaatcttctggaatggaatggaatggaatggaatggaatgatacggaatagaatggaatggatcgaaatggaatggaatggaatggaatggaatggaatggaatggaatcgttccgagtggaataggagggaatgtattcgagtggaatgaaaggaatggaatcaaccagagtggaatggaagggaatggaatggaatgnaaaataataggaatggaatcaacccgagtgaatggaatggaaaggactggaatggaatggatggatggaatg

SEQ ID NO: 794 - DNA, 271 bp, Homo sapien
cgcaagtaggtctacaagacgctacttcccctatcatagaagagcttatcacctttcatgatcacgccctcataatcattttccttatctgcttcctagtcctgtatgcccttttcctaacactcacaacaaaacaaaaaaaaaaaaaaaaaaaaaacccgggggctggggaagcaaggaaataagtcatctgtatgctgactggggataatggcatcaaatgtcagtccttgacatttggggggaacagcaggtgccagagctaaaaggt

SEQ ID NO: 795 - DNA, 181 bp, Homo sapien
cctgtttccattcaacaagagcactacattcatttagctaaacggattccaaagagtagaattgcattgaccgcgactaatttcaaaatgctttttattattattattttttagacagtctcactttgtcgcccaggccggagtgcagtggtgcgatctcagatcagtgtacctgcccgga

SEQ ID NO: 796 - DNA, 497 bp, Homo sapien
  misc_feature (1)...(497): n = A,T,C or G
actttaaaatgtgagtttgagttcttctttgtggaaacttaagatgtggtgtaaatgattctttccaaaattgtccagcagcttgaatgaggcagtgacaattctgaggtggtttattgggagtccttctacatttctcttagataactctgcactctgggtggctattgtgtagccttactgccccanngtgcctgttagccaaatatttcccctctgataggaatattttctaagaatcagctgataacttgcgtgctggaccttgttatctgtgcccctgggagacacacgttttcttggttttgaaaacctgaaacacaggcaactttacattttggggaattagctgatgcctcctgaagcctgaggaggtggcggggaatatgagcggtgctgtctctctcaaaagtgccctttagatgattccccctcctagggctgcctgcangggctgtangcttgggaaagattgtgtaangtgacagtgaatcaga

SEQ ID NO: 797 - DNA, 551 bp, Homo sapien
accaccagcaatctctgcatttaagtggtcagagagcactcctaataaacttgattctactgggaaaggttcataaagaaattttttataaaagtctttctttatgtcatgaactagaattacagctttgccttggtcatcgaactgcggcctcccagcacgccccatcatctggaggacatctgtaatgggaaaatccacataacgtcttgtttttccatcatagtattctgttcccttaataattactaaatgagctggaaagtttacaccccaggctaatgtgcttgtagcaataagaacctgaactttacagtttacaaatagttcctctactgtttttcggtccctctcatgtagtccagcatgatgcattcctatcccgaaagtaagggtcagcttgaggttggaatctcttactgttgcaatgatgttctccatctctctttcatccatgtttaaccactgctttggatcttcttcagtagccaggaaggcgatcaattccaaagcagtaagacgagtttgacgtcttgatgagacaaatatca

SEQ ID NO: 798 - DNA, 326 bp, Homo sapien
accagcccaccgggggacagctgctgttggatgggaagccccttccccaatatgagcaccgctacctgcacaggcaggtggctgcagtgggacaagagccacaggtatttggaagaagtcttcaagaaaatattgcctatggcctgacccagaagccaactatggaggaaatcacagctgctgcagtaaagtctggggcccatagtttcatctctggactccctcagggctatgacacagaggtagacgaggctgggagccagctgtcagggggtcagcgacaggcagtggcgttggcccgagcattgatccggaacccgtgtgta

SEQ ID NO: 799 - DNA, 346 bp, Homo sapien
acctctgcatacagatatattataaaacacaagcaatgttatttatgaaactgtgatgcagtcttcaacatcaagaaaaaatgacaactataataaaatttacaacacagtttcacagtctaaatgctatgttcctttaagtattttcatatttttaatcatttattaagagaaaattgtgaaaagttaatttggccttatagagagattcaggatagatgtagcctatagatgtgtcattttaataagttgggatacatgtttagtttttccttatattcctgttcagtgaacagattttcataattctcacttgttaaagtgctgcaaaaattgcattttcagt

SEQ ID NO: 800 - DNA, 502 bp, Homo sapien
acctgtgggtttattacctatgggtttatatcctcaaatacgacattctagtcaaagtcttggtaatataaccaatgttttcaaatgtattctgtcatacaaagagcagatttttattgaacttgtgcaataactatattaccatacaatataaatattcatgaatagtttcccaagtctggagcgaccacatagggagaaaatgtaaatgtctcaatttttgttcacaaaagtatattttatcaaattgctgtaagctgtggatagcttaaaagaaaaaaaagtttcctgaaatctgggaaacaagacatttaaagaatcagcaaaatttcaaataaaaaattataaaaatattatcctcattagttcatttagtcccatgaaattaattattttctctgcttgatcttggtggacagtttcatgaagctgtcagttagttcattaaagttttggaaattctcagacagtgcagtggtatcagaaacttgtattcaagagt

SEQ ID NO: 801 - DNA, 537 bp, Homo sapien
  misc_feature (1)...(537): n = A,T,C or G
actgtgatgtccaatctaccacacagggcttcaccaagccaaagcagccacactgaaagaaatctgccaggttctgcatgaatccaagattgtatggtgtcttcctgagggacaacgtctgtttcatatgcttgctctgcttctgcaggctgattctctcatgggaggtcaggcccagaaaggcaatctgaaagagttgatttaataataaaaatgttgaccatgagaaatggaaagttgctagcatcaagatatataaaacccaaggggaacaggccacaatctgattgaggtaagtccataatccatcttctttgaatgttgtggcacaatgactggacaaatagatgaaagatccatatataatccagccacataccatggaaaggaaaaacaagaagaatatgtaatagtgatggttgccaaaacctatgcaccgtccagtccacangcagtgttgatcatatcgagccacacagcagttgcatacatggcaggtggagtgaccttaatggcttccttataaagacatgatgt

SEQ ID NO: 802 - DNA, 399 bp, Homo sapien
acattacaaatctctgaggccattaggggaaaaggaaggggtgtggtttgtctttgaaattacggttaatacttttagacagtaagtccggctggttgcagggctatttgccccgacagcatcagcctgtaacatttcttctctttcctttgtgccactgagtcgttccctggccagaggacataaatggtgctggtaggaggttatcagagtaaggaaggtagcagatataggtgcagggtgcctgtcattcactgtgttatttggtttaaatcaaagtgattctgggggaagctatgctctttcagtggataataaaattggtaactctattgtaaaacatgtcaatggtgtgtgaagaaaaatcaaccaatctgtaggtgttgataactagacagt

SEQ ID NO: 803 - DNA, 250 bp, Homo sapien
  misc_feature (1)...(250): n = A,T,C or G
actgccaggggacagtgctgtgtcagttgaacctgggctgctgtgggaagttgttgattcctgactggggcctgaggtggtggtgctggcaggtaacagtgttgtatccgttgagcctgggctgctgtgggaagttgtagaatgccgactgaggcctggcgtggtggtgctgtcanngaatgctgttgtgtgcgttgagcctggttcggctgtgggaggtggnggattcttcactgacgcctgagcttgt

SEQ ID NO: 804 - DNA, 451 bp, Homo sapien
  misc_feature (1)...(451): n = A,T,C or G
acaagtcattactcccccttctcccatatgaacaagaattttttaacggtcagaatatattgggcatcaaattaaaaacttttttttcaaaagtctacagaatggatattggagcaaaaattacaaagtgggtcagatacaggtttttaaaaactgcattactgaatttaacaaaagtcagacactagaatcatatatttgctgcataaaagttgatttgatacctggtggtgattgaatttagtctcaaagactcataaataaaaatctgacttaagacgtagtcataccagtataccaattctcccatcactttgactttcggcagagagattagagcaaaaaatattcaggagaacagtggagttacattgnattatgtatgnttaatataatatcaattttaaggntaangntaaggaaatcttaattttaanggtaaaccttgagt

SEQ ID NO: 805 - DNA, 160 bp, Homo sapien
acattgtatgggcttagacaaatgtatgatgatatctacaattatagaatcatacagaatagtttcactgccctaaaacttctctatgcttcacctgttcatccctttcttccctaatcccctggcaaccactttaaaaaaaaaattaggttcagggggt

SEQ ID NO: 806 - DNA, 276 bp, Homo sapien
actggcatttctgaatggatgtaagtggagtattttagtctaaaggcttttcaaattacttgaatttttttaaaaattgaggagctttatttctatttacccttccatttttgtatatcaaatttccattgtcattaaaaactgtatcttgaaactttgtgaactgacttgctgtatttgcactttgagctcttgaaataaatgtgatttttgtgtgattatctggtttccagttttaaacattaactgtcaccttttattcttaaacttgaaagt

SEQ ID NO: 807 - DNA, 373 bp, Homo sapien
ctggaagtcagcttgaaaaacaatgtggtgagtgtcaacaaggagcctgttgccgagcctgacatcatggccacaaatggcgtggtccatgtcatcaccaatgttctgcagcctccagccaacagacctcaggaaagaggggatgaacttgcagactctgcgcttgagatcttcaaacaagcatcagcgttttccagggcttcccagaggtctgtgcgactagcccctgtctatcaaaagttattagagaggatgaagcattagcttgaagcactacaggaggaatgcaccacggcagctctccgccaatttctctcagatttccacagagactgtttgaatgttttcaaaaccaagtatcacactttaatgt

SEQ ID NO: 808 - DNA, 266 bp, Homo sapien
ggttaggattcggcgctaggaggtgaaggcgttgtgtgagttgaggctgggcgggtctggaaggcagtagattctccctgaagtccagggcttgtggagctggcaggggacagtgttgtgcgtggtgagccagtgctgctgtggacgcgtgtagatgcttcaacgatgcctgagcttgtggtgctgtcagggaagagtgttgtgtgagtggagcctgggttgctgtggaaggttgtagattcttgaccaaaggataaggctgtggt

SEQ ID NO: 809 - DNA, 569 bp, Homo sapien
  misc_feature (1)...(569): n = A,T,C or G
gtgaatgagcggctgatcagcatggcctatgggcagattggaatgatccaggccctgggaggcttctttacttactttgtgattctggctgagaacggcttcctcccaattcacctgttgggcctccgagtgggctgggatgaccgctggatcaacgatgtggaagacagctacgggcagcagtggacctatgagcagaggaaaatcgtggagttcacctgccacacagccttcttcgtcagtatcgtggtggtgcagtgggccgacttggtcatctgtaagaccaggaggaattcggtcttccagcaggggatgaagaacaagatcttgatatttggcctctttgaagagacagccctggctgctttcctttcctactgccctggaatgggtgttgctcttaggatgtatcccctcaaacctacctggtggttctgtgccttcccctactctcttctcatcttcgtatatgacgaagtcagaaaactcatcatcaggcgacgccctggcggctgggtggagaangaaacctactattagccccccgtcctgcacgccgtggagcatca

SEQ ID NO: 810 - DNA, 195 bp, Homo sapien; identical to SEQ ID NO: 8

SEQ ID NO: 811 - DNA, 298 bp, Homo sapien
accatcttcttcagaactgcatctaagaggctgtgctggctgggaatcatacagctgtgggcaacaactgcatcagccccaaggcttccctccagaccaaaaggtgattcatggcccctggttaatatcaccctaggttctcccctgtcccagttttaacataatatttcatagaaatactagtgccataaaaagtcaatatttcaaatataaaaattattttatacaaatgtaattcataatcattcttttaaaatacagcattgttatatatgtttgaaacattattaaaataaat

SEQ ID NO: 812 - DNA, 515 bp, Homo sapien
  misc_feature (1)...(515): n = A,T,C or G
acatgtgctaatgttctgtaaatccagaaaatcatatcacataagattcaataaggaattaaagaaatcaaattaatcacacttgtgttaactaaataagaataggtcagatacctgtttccaagttatgctgggtatataaaaagcttctctgcaatcatagaaaagtttgaaaaggttcattgatgaaagcaccttgcatttcagatgaacttcaatattttggggcttttttatataagagctttaacaagtatatatgcacctgtatatttgaatagatattgatgaaaggggccatacaggcctcagagtagtgcaccatcagaaatattttaggggatacagtgtcttttaaatttgaatattcaagtatttaagttctacaaagttatatgatacctcctggatgtttcctagaagttctcatattcatagttagaaacangcttttttaaaaaggaaatgccgagtttctcaaatcaaatttcacataacttagagctctatttctg

SEQ ID NO: 813 - DNA, 329 bp, Homo sapien
gctaaaaaaggatacaaaatggaattacatataatagaatgctcaggtaaacccgcaaaaggtggaagagtatggaaaacagaaataggaatgaagaacaagggcaaaaagtagaaaatggtaacaaatgtggtagatgttaattcagcaacatcagtaatcacctttttaaattttttttttatttttttgagacagtctcactctgtcccccagggtggagtgcagtggcacagtcccagtctattgaaagctttgacctcccaggctcgagtgatcctcccaccacagcctcccaagtagctgggactacaggcacaagccactgt

SEQ ID NO: 814 - DNA, 280 bp, Homo sapien
cgagcggccgcccggcaggtactgtcccaagtgccggggggagaacgagaagaccatggacaaagccctggagaaatccaaaaaagagagggcttacaacaggtagtttgtggacaggcgcctggtgtgaggaggacaaaataaaccgtgtatttattacattgctgcctttgttgaggtgcaaggagtgtaaaatgtatatttttaaagaatgttagaaaaggaaccattcctttcatagggatggcagtgattctgtttgccttttgttttcattggt

SEQ ID NO: 815 - DNA, 143 bp, Homo sapien
  misc_feature (1)...(143): n = A,T,C or G
acacgctcatccctnctgtagtgatcatagctgtaggagccctgcttttcatcattgggctaattggctgctgtgccacaatccgggaaagtcgctgtggacttgccacgttnntcatcatcctgctcttggtttttgtcaca

SEQ ID NO: 816 - DNA, 191 bp, Homo sapien
accgcggccgttaaacatgtgtcactgggcaggcggtgcctctaatactggtgatgctagaggtgatgtttttggtaaacaggcggggtaagatttgccgagttccctttacttttttttaacctttccttatgagcatgcctgtgttgggttgacagtgagggtaataatgacttgttggttgattgtag

SEQ ID NO: 817 - DNA, 553 bp, Homo sapien
actcactattgctgctagtctcagtttcaaagatccatttgtcattccactgggaaaagaaaagattgcagatgcaagaagaaaggaattggcaaaggatactagaagtgatcacttaacagttgtgaatgcgtttgagggctgggaagaggctaggcgacgtggtttcagatacgaaaaggactattgctgggaatattttctgtcttcaaacacactgcagatgctgcataacatgaaaggacagtttgctgagcatcttcttggagctggatttgtaagcagtagaaatcctaaagatccagaatctaatataaattcagataatgagaagataattaaagctgtcatctgtgctggtttatatcccaaagttgctaaaattcgactaaatttgggtaaaaaaagaaaaatggtaaaagtttacacaaaaaccgatggcctggttgctgttcatcctaaatctgttaatgtggagcaaacagactttcactacaactggcttatctatcacctaaagatgagaacaagcagtatatacttgtatgactgc

SEQ ID NO: 818 - DNA, 291 bp, Homo sapien
  misc_feature (1)...(291): n = A,T,C or G
acacctgagcttccatcttggtcctgtngataggaagtagagggatagaggtggggaaagcactcacactgtctctctcctgtctgtgtggggttgttactgccactgtgtcaccccacacagnntggcagttttccagctgttaggggagtgagatcagcttctctcccccttgtagagtggagcggatcgagcanaatgccaccaacaccttcctggtctacaccgaggaggacttgggagacctcttgaagatccagctcacctgggagggggcctctcagtcttggt

SEQ ID NO: 819 - DNA, 411 bp, Homo sapien
acggccagggctattggttgaatgagtaggctgatggtttcgataataactagtatggggataaggggtgtaggtgtgccctgtggtaagaagtgggctagggcatttttaatcttagagcgaaagcctataatcactgcgcccgctcataaggggatggccatggctaggtttatagatagttgggtggttggtgtaaatgagtgaggcaggagtccgaggaggttagttgtggcaataaaaatgattaaggatactagtataagagatcaggttcgtcctttagtgttgtgtatggctatcatttgttttgaggttagtttgattagtcattgttgggtggtaattagtcggttgttgatgagatatttggaggtggggatcaatagagggggaaatagaatgatcagt

SEQ ID NO: 820 - DNA, 531 bp, Homo sapien
ctttgacctttttgagaacaagaagaaaaagaacaacatcaaactctatgtccgccgtgtgttcatcatggacagctgtgatgagttgataccagagtatctcaattttatccgtggtgtggttgactctgaggatctgcccctgaacatctcccgagaaatgctccagcagagcaaaatcttgaaagtcattcgcaaaaacattgttaagaagtgccttgagctcttctctgagctggcagaagacaaggagaattacaagaaattctatgaggcattctctaaaaatctcaagcttggaatccacgaagactccactaaccgccgccgcctgtctgagctgctgcgctatcatacctcccagtctggagatgagatgacatctctgtcagagtatgtttctcgcatgaaggagacacagaagtccatctattacatcactggtgagagcaaagagcaggtggccaactcagcttttgtggagcgagtgcggaaacggggcttcgaggtggtatatatgaccgagcccat

SEQ ID NO: 821 - DNA, 402 bp, Homo sapien
acgacatgtttgtgaatttcccagaccagccggtggtgtggagagaaatcagcattattacatcagcattaaggaacgattcacaggacaaacaaacccaatttttaagaagtttatttgaaactcttcctggtcgagtccagtgtgaaatgttactaaaggtcacggaacaatgcttcaacacgttagaacgatcagaaatgttgcttctacttttgaggcgcttccctgaaacggtggtgcagcatggggttggccttggggaggcactattagaggctgaaactattgaagaacaagaatctccagtgaactgctttagaaaattatttgtttgtgatgtccttcctctaataattaacaaccatgatgttcgattacctgccaatttattgtataagt

SEQ ID NO: 822 - DNA, 195 bp, Homo sapien
accattggtggccaattgatttgatggtaagggagggatcgttgacctcgtctgttatgtaaaggatgcgtagggatgggagggcgatgaggactaggatgatggcgggcaggatagttcagacggtttctatttcctgagcgtctgaggtgttagtattagttagttttgttgtgagtgttaggaaaagggcgt

SEQ ID NO: 823 - DNA, 195 bp, Homo sapien; identical to SEQ ID NO: 8

SEQ ID NO: 824 - DNA, 231 bp, Homo sapien
  misc_feature (1)...(231): n = A,T,C or G
acggatgctacttgtccaatgatggtaaaagggtagcttactggttgtcctccgattcaggttagaatgaggaggtctgcggctaggagtcaataaagtgattggcttagtgggcgaaatattatgctttgttgtttggatatatggaggatggggattattgctaggatgaggatggatagtaatanggcaaggacgcctcctagtttgttagggacggatcggagaaac

SEQ ID NO: 825 - DNA, 431 bp, Homo sapien
  misc_feature (1)...(431): n = A,T,C or G
acaaaaggttganattgggcaaaagagagccagtgaagatacaacttcaggttcaccacccaagaaatcttcagcaggaccaaaaagagatgccaggcagatttataaccctcccagtgggaaatatagcagcaatttgggcaactttaattatgagaggagccttcaggggaagtagaggtggccgaggttggggcacacgaggaaatcgtagtcggggaagactctactgaataagacatcagcattcttcagcattgtcatgagcttaatatacttaaattctactactcattggattgccggggatgtccctttaaacagactgctgccttcagctaaaaacttaatgttctttatacctttgtatgtatgacctacttttngtaacagaccatggttgtgtccaaggtaaaaaccacagtgatatt

SEQ ID NO: 826 - DNA, 346 bp, Homo sapien
  misc_feature (1)...(346): n = A,T,C or G
accagttacccanntgaaaatatggagtaactttgttttgtatggtaaggtttaggaatggtggatggagggtatctctatataaataaagtgctcaacaatgtgcaatgattgtaaatttagtaagatattacagccatttcatgaatgctttaccattcaacatagtatctattacaaaacacctttcctgtatccatatacttcaggtgttgctgttaacatttactatgatatttattttaaccaaaatgttactcacattaaatgtttattctttaaaatgaatgtattatgtttttaacccacaaatgcatacttaccctgtgcctcatatttcaatagt

SEQ ID NO: 827 - DNA, 195 bp, Homo sapien; identical to SEQ ID NO: 8

SEQ ID NO: 828 - DNA, 251 bp, Homo sapien
gaaattcttagtgatccagaggttcttgcagccatgcaggatccagaagttatggtggctttccaggatgtggctcagaacccagcaaatatgtcaaaataccagagcaacccaaaggttatgaatctcatcagtaaattgtcagccaaatttggaggtcaagcgtaatgtccttctgataaataaagcccttgctgaaggaaaagcaacctagatcaccttatggatgtcgcaataatacaaaccagtgt

SEQ ID NO: 829 - DNA, 418 bp, Homo sapien
acagtgatagctccccctgggcaatacaatacaagaacagtgggttttgtcaaattggaacaaggaaacagaaccacagaaataaatacattggttaacatcagattagttcaggttacttttttgtaaaagttaaagtagaggggacttctgtattatgctaactcaagtagactggaatctcctgtgttctttttttttttaaattggttttaattttttttaattggatctatcttcttccttaacatttcagttggagtatgtagcatttagcaccactggctcaatgcgctcacctaggtgagagtgtgaccaaatcttaaagcattagtgctattatcagttaccaccatttggggcttttatccttcatgggttatgatgttctcctgatgacacatttctctgagtttta

SEQ ID NO: 830 - DNA, 520 bp, Homo sapien
  misc_feature (1)...(520): n = A,T,C or G
acaaaactcaaatagatgaacttttaagacaaagtctcagttaacttgtgaaaattgaattcccatcaaactgaatgtaagcatttaatatctaaacatttaatgtggacttccaataaattcttttatagaattagaaagtgggatttactgtagagtgtaaaaatttttttaaaattgttttacactatgtagtaatatttacagttaaattattttgtgcaatatttgaactttatttttgaaactattctttaaagatttattttttaaagcattcattttttttccttgaatagcacagagatttattactttatcctcatataaatatggctagagaagaagaatggtgttcatatatgtattgtagatatacaactagttgnatctataatttgnaagtgtttatatatatattaagaacatttgaagagtaatgttaacatactgaaactttgaaatctttcacatttaaaatttcaacatatcttaattactgctcatgaaaatgtacctc

SEQ ID NO: 831 - DNA, 568 bp, Homo sapien
acagttcacatgacaagtcgtatttcagttcaaacgtgttggcgcttttcatcaaatttgataagaatatgctgttttctactatgttcataatgaaatgaatggggaagaaaagggactagcctttctctagggaggtagttttgtgcatggctttgcttttatcagttttaatactaggctgaaaagccaaaatgaaaaattttttattatttttatttctatgcatttagagtttcaacatggagattctaaatcctatactgatacattttaaggaagaaatacacaattgcacctttgtataatctttatacatacaatgtaaacatgatgctacagagtaagctgtgttgaaaattaaaacccttcacagaagagtgatgtgtattaagccgtcaggatgccatttaatggcaggcatctccacaggtaggtcaacttctccaggctactagaatgtttcagtggcattcaatcaacccaaagatgtaatgtgtgactcatgaagctttcttttcatggtggaaagctctgctgtcaagtgtttcacagcaaaaatattcag

SEQ ID NO: 832 - DNA, 473 bp, Homo sapien
acttatttcaacaattcttagagatgctagctagtgttgaagctaaaaatagctttatttatgttgaattgtgatttttttatgccaaattttttttagttctaatcattgatgatagcttggaaataaataattatgccatggcatttgacagttcattattcctataagaattaaattgagtttagagagaatggtggtgttgagctgattattaacagttactgaaatcaaatatttatttgttacattattccatttgtattttaggtttccttttacattctttttatatgcattctgacattacatattttttaagactatggaaataatttaaagatttaagctctggtggatgattatctgctaagtaagtctgaaaatgtaatattttgataatactgtaatatacctgtcacacaaatgcttttctaatgttttaaccttgagtattgcagttgctgctttgt

SEQ ID NO: 833 - DNA, 388 bp, Homo sapien
actctataaatctagtggaaacatttctgcacaaactagattctggacaccagtgtgcggaaatgcttctgctacatttttagggtttgcctacattttttgggctctggataaggaattaaaggagtgcagcaataactgcactgtctaaaagtttgtgcttattttcttgtaaatttgaatattgcatattgaaatttttgtttatgatctatgaatgtttttctcaaaatttacaaagctttgtaaattagattttctttaataaaatgccatttgtgcaagatttctcaaagattaggtatatatttaaatggaagagaaaatatttttatgggagaaaaatacatttgaaccatgaaatttcatcttttaaataacatccagt

SEQ ID NO: 834 - DNA, 195 bp, Homo sapien; identical to SEQ ID NO: 8

SEQ ID NO: 835 - DNA, 472 bp, Homo sapien
actcttggtttgtcaatgggactttccagcaatccacccaagagctctttatccccaacatcactgtgaataatagtggatcctatacgtgccaagcccataactcagacactggcctcaataggaccacagtcacgacgatcacagtctatgcagagccacccaaacccttcatcaccagcaacaactccaaccccatggaggatgaggatgctgtagccttaacctgtgaacctgagattcagaacacaacctacctgtggtgggtaaacaatcagagcctcccggtcagtcccaggctgcagctgtccaatgacaacaggaccctcactctactcagtgtcacaaggaatgatgtaggaccctatgagtgtggagattgcagtgagcccagatcgcaccactgcactccagtctggcaacagagcaagactccatctcaaaaagaaaagaaaagaagactctgacctgt

SEQ ID NO: 836 - DNA, 340 bp, Homo sapien
  misc_feature (1)...(340): n = A,T,C or G
actgagattgtccatggcattcataactgtcttcctaaaaacaaagcaatggctcaccaacgagccagccttcatgcttacatgtgacactgtaagtggaagtttagaaggatgtcctgacattaaaaagtagcctatcatcagattccagagctgaacagctgtgtttttctgtcagattttgattgttttggccttgcttgggaaaacctgcaggagtattgtatttttggcattgtagagcatttgagtagttggttcctttaaaaaggctttgaatactgtcctaaaaactnatccctaccactcacaagaaccaaagntttacctggctaatagt

SEQ ID NO: 837 - DNA, 473 bp, Homo sapien
  misc_feature (1)...(473): n = A,T,C or G
atttgttttcacagcaatnaatcttcagttctttgtttatgattccacttaacaaaaggcctgcagaagtgatttattatttgggtatttggagataatacatttgatggntntttggaaaacctttttcactccatactcagatatgcttcattgtcaaatgcatatttagattagattattgaattgtaatgtttatctgctgctttttttaaataaaatttgactgaaaatgtnnaattggcattttttaatgacttagccaaagaagtgcanctattattccatattaataggcttgcatttgcttttcctaaatcttatttaggctaaatcagtnnntatttttctctgattttttttaataccacagaatcacctgagtgtcaattgaaagtttgtcaattaaaaggtaacctttttaatctcgtaggaggaatctcantaanacatttttcctgatatgtagagca

SEQ ID NO: 838 - DNA, 205 bp, Homo sapien
actgcggcgggtaggcctaggactgtgggggcaatgaatgaagcgaacagattttcgttcattttggttctcggggtttgttataattttttatttttatgggctttggtgagggaggtaagtggtagcttgtgtttaatatttttagttgggtgatgagaaatagtgtaaggagtatgggggtaattatggtgggccatacggt

SEQ ID NO: 839 - DNA, 167 bp, Homo sapien
accaggaagttcattctcaattcccttcgaacgcagagattctgcagacatttaaaagcccaatgctgttcccaagcaagaggcagcacctgacaacaatgctgcatttaatggagcaggattacagtaacattggatattcataaagaagatttttaaagtacctg

SEQ ID NO: 840 - DNA, 332 bp, Homo sapien
  misc_feature (1)...(332): n = A,T,C or G
cttggccccattgtanattgccctgtgcagtaaactttcaaggtgtcggctgccccagattgcttcatttgctgggtgtggaaagagttgctatggccaggcatatgggatttggaagctcancanaagtgacttctgctctgtggttgctgntccccggctttcacagacatggtatggcagccattcttttatctatttaaccaagangatgctggggaattgtgctgcttgtcctgttggctggtggctgcattatgtcctggggtgtgcatgtgggtctatttagagcttctgtcccttccttcccattgcaagttgcacccagatga

SEQ ID NO: 841 - DNA, 195 bp, Homo sapien; identical to SEQ ID NO: 8

SEQ ID NO: 842 - DNA, 501 bp, Homo sapien
  misc_feature (1)...(501): n = A,T,C or G
acctgtgggtttattacctatgggtttatatcctcaaatacgacattctagtcaaagtcttggtaatataaccaatgttttcaaatgtattctgtcatacaaagagcagatttttattgaacttgtgcaataactatattaccatacaatataaatattcatgaatagtttcccaagtctggagcgaccacatagggagaaaatgtaaatgtctcaatttttgttcacaaaagtatattttatcaaattgctgtaagctgtggatagcttaaaagaaaaaaagtttcctgaaatctgggaaacaagacatttaaagaatcagcaaaatttcaaataaaaaattatgaaaatattatcctcattagttcatttagtcccatgaaattaattattttctctgcttgatcttggtggacagtttcatgaagctntcagttagttcattaaagttttggaaattctcagacagtgcagtggtatnagaaacttgtattcaagagt

SEQ ID NO: 843 - DNA, 388 bp, Homo sapien
  misc_feature (1)...(388): n = A,T,C or G
acacatttttgtnngaacatctattttcagttctcttgggtatatacctaggtgtagaattgctcgctcatatggtaatctgtgtttaactttttgaggaagtgccaaattgttttccacagtggctgccccattttacattcccactgacagcatataagggttcctatttcttcacatcctcaccaacacttgctcttttactttttctttcttaatttttttaaatttttttttgaggcaggatcttgctgtgttgcccaagctggaatgcagtggtgcaatcatggctcactgcagcctcagcctcccaggctccgggtgatcctcccacctcagncatctcaagtagctgggactacanggcacatgccaccatgcctggcta

SEQ ID NO: 844 - DNA, 178 bp, Homo sapien
acttcaaaaaagtaaaagtaggattaaaaccaatgttaaagtgaatacttccaaatcacttaaggggttaaaaggcagaatttggggcctatatatttttctctttaagacaaaaggatccaaaaaaccttcatattgtaagcaggaaaaaagaaatcagttcccaatgacacctggt

SEQ ID NO: 845 - DNA, 270 bp, Homo sapien
  misc_feature (1)...(270): n = A,T,C or G
accacagggaactggagggtaaatcactgatgcaccacaatggcaggttaattcatcaaaactggcttgccagcatgtctggcagtttccacgatgacaaggttcttcacacctatgaaggccacaacggagtttcctcccacaaatcaaaggacacttgtgctccttatccacacagcatatctcattacatttatgccgnncacacaaccgtttcttgttacaccgcttgtcacacataaatgtagcatcttcacttttgagactggt

SEQ ID NO: 846 - DNA, 549 bp, Homo sapien
acgagacagaacgatggcagacctgcatactgcacgcttggaaaacgagaaagtgaaaaagcagttagctgatgcagtggcagaacttaaactaaatgctatgaaaaaagatcaggacaagactgatacactggaacacgaactaagaagagaagttgaagatctgaaactccgtcttcagatggctgcagaccattataaagaaaaatttaaggaatgccaaaggctccaaaaacaaataaacaaactttcagatcaatcagctaataataataatgtcttcacaaagaaaacggggaatcagcagaaagtgaatgatgcttcagtaaacacagacccagccacttctgcctctactgtagatgtaaagccatcaccttctgcagcagaggcagattttgacatagtaacaaaggggcaagtctgtgaaatgaccaaagaaattgctgacaaaacagaaaagtataataaatgtaaacaactcttgcaggatgagaaagcaaaatgcaataaatatgctgatgaacttgcaaaaatggagctgaaatg

SEQ ID NO: 847 - DNA, 411 bp, Homo sapien
  misc_feature (1)...(411): n = A,T,C or G
acccgagcgccttcccctcacctcaaccagagaagagcatccggttgctttttaaagcttttagcctgccctagcaaggacaaagcatgttagattagagatgcttctgctgatcgcaggggttcttatttgaaaacatctatgatgggggtggggtgggaggagacaggttgtggttatgcangaaaatcttgtcctaaaaatatatgagtttgggggtaaggggtgggatagccaannaaaatcaggtnattattttaaaatgaacatatgtatttttattaacttttagttaaatacagattttacaacgaggtcagcataagcctaaatctatatagagggctaactcaggcaattntcttgtttatttgnagactggattnaaaacaacctgtcctgttttgtcag

SEQ ID NO: 848 - DNA, 277 bp, Homo sapien
  misc_feature (1)...(277): n = A,T,C or G
accggagatcgaccactgactgagccaccctctccgtagggttctttctcgaggactctaccctcctcccccacgtcctgtctcagctgcagtcgtaagtccgtgcaccatccttgacgttttgctgccacctctgtccacattcttcttggatttgtataaaagaatctttttttaccttgatgtagaatcatggtggaaaaagttggaaacacagatctgtgcagtntctacattcactgattattacagtgtgattttcatcggttttgtaagt

SEQ ID NO: 849 - DNA, 445 bp, Homo sapien
gtctttggccagatgtgccgttagagtgcatagtatccctgggcactggacgttatgagagtgatgtgagaaacacggtaacatacacaagcttgaaaactaaactttctaatgttatcaacagtgctacagatacagaagaagtccatataatgcttgatggcctgttacctcctgacacctattttagattcaatcctgtaatgtgtgaaaacatacctctagatgaaagtcgaaatgaaaagctggatcagctgcagttggaagggttgaaatacatagaaagaaatgaacaaaaaatgaaaaaagttgcaaaaatattaagtcaagaaaaaacaactctgcagaaaattaatgattggataaaattaaaaactgatatgtatgaaggacttccattcttttcaaaattgtgatgagtatatgcttatgttctcataaatga

SEQ ID NO: 850 - DNA, 288 bp, Homo sapien
acaatgtttataaacttgtttttcttttcaaaatcatcagattttcagattaaattcagcactacacagtatgcccttgaagtaaaatgaggttacctgctttatttggataccaagttcccttcagacagcattaaaataaagacaagtaagactacacagataaaatccagtataattcaaatccaacaatgaaaaatttcccccatattgttgcaaaattctttctactgaaatgctttgctacaataataaaaagcatacattacatataaaagataccagtgt

SEQ ID NO: 851 - DNA, 426 bp, Homo sapien
gtggggagggggcacggatctccagggaatctgagacagccagaaagggagtgggctgagggttttggggtgggaggtaggggaagggtagatagagttcgtggtcaggtttagggagcagaaggaattggggatgttttccaggaggagtgggacctctcagaaaatttgttcttgggctggacatggtggctcacgcctgtaatcccagcactttgggatgccaaggcggacagatcacgaggtcaggagatcgatcgagaccatcctggccagcatagtgaaactctgtctctactaaaaatacaaaaattagctgggcatggtggcgcgcgcctgtaatcccagctactcaggaagctgaggcaggagaatcgcttgaaccagggagtcggaggttgcagtgagccgggatcgtgccacagt

SEQ ID NO: 852 - DNA, 578 bp, Homo sapien
cttagagcagcatccagtatttgctttctagataatatgcccaataacatgacctagaggggcttctgtgctgtgtagggatttaaccaacttcagtggttcagggagctcaaactatatgtaaaacaagtttagaatgtatgctatctagcccgttatctctgatccttctctaaaaccatttgaaatagcttcattgatcaacatttcataaatgcatctgtggtagaggtagaaagcagcacctttcctaattggcaaatgatcagactaatgtgtgctaatgtttttcttccatgctttcagtcagattcaactattttatcctccacagttgcttaacttggtgttggaggagggtttaagcattaagataggaagcaggaaatttgattgctctaaatttagaaattatatccctaaaaattaaaacatgaatactgggtggtaatgataattgaggcaaatgtatttattttggtgacattttgcatatatgaagattttctgaaataggaccttcaagatcctagggggttttgtttggtttttaattgtgaggaataaaaaatcttctg

SEQ ID NO: 853 - DNA, 526 bp, Homo sapien
  misc_feature (1)...(526): n = A,T,C or G
acagttcaaatgcantggtgactttgatttatagcaagaacaagttttccatttgctctatatggaaacgtaaagagattttgaaactgctttaacaagggctgccacaagaacttcttttattgacttgaaaaattactcctacattcatgatgtcacaaaatcgtatgtatttttcagtcatggtttcatgcatttttattctataaacatacattataagtatacaaatatagattatattctataaataattcaaggatttataacatatctaaagatacattccttataaatatcagggatttttctgtataaattacttgtttgtttattattattattattattttgagatggagtctagctttgtcaccaggctggagtgcagtggcgtgatctcggctcactgcaacctccgcctcccgggttcaagtgattctcctgcctcagcctcccgagtggctgggattacaggcacacgctgncacgcccagctagattttgtatttttggtnnnnnnnnc

SEQ ID NO: 854 - DNA, 195 bp, Homo sapien
accattggtggccaattgatttgatggtaagggagggatcgttgacctcgtctgttatgtaaaggatgcgtagggatgggagggcgatgaggactaggatgatggcgggcaggatagttcagacggtttctatttcctgagcgtctgagatgttagtattagttagttttgttgtgagtgttgggaaaagggcgt

SEQ ID NO: 855 - DNA, 257 bp, Homo sapien
  misc_feature (1)...(257): n = A,T,C or G
actgcggcgggtaggcctaggactgtgggggcaatgaatgaagcgaacagattttcgttcattttggttctcagggtttgttataattttttatttttatgggctttggtgagggaggtaagtggtagcttgtgtttaatatttttagttgggtgatgagaaatagtgtaaggagtatgggggtaattatggtgggccatacngnagtatttagttggggcatttcactgtaaagaggtgttggntctcttaatctt

SEQ ID NO: 856 - DNA, 185 bp, Homo sapien
acatggtgtggggcactagggggcagtagctttccttcacgttggcatccaggaagatccttctggggccggaaggcacagggcagtggggaaccagtgtttggagggtgtcctctgctatctacagaggaagaagagctgcagtgagaggtgggatccctaagttggacccacccattgcggcc

SEQ ID NO: 857 - DNA, 454 bp, Homo sapien
  misc_feature (1)...(454): n = A,T,C or G
actgtggtcgggagactgatttgagactgcagagctgatgctgggtagagggtctggacttgtattcatgttctgtctcagggcagcccctggagcaggagatggcagaggcatttacagctgcagaaaacagggaggaatggaatctgaggtagccctggcctcaaaattcaggcctggctgtatcatttacagagatttttctggagggaaaagtctcatttctgaggaaggcaaggtggctaatcattattaattttttttaaactttttgggccgggcgcagtggctcacgcctgtaatcccagcacttttgggaagccaaagtgggtggatcacttaaggtcaggagttcaagaccagcctggccaacatggtgaaaccctgtctctactaaaaatcaaaaaagtagccgggtgtggtggtgcacacctgtaatcccagctactcngga

SEQ ID NO: 858 - DNA, 571 bp, Homo sapien
  misc_feature (1)...(571): n = A,T,C or G
acagtcatagctcacttcagcctcgaactacttagctcaagagatcctgccgcctcagcctcccgagtagctggaactacaggtactacattcttattttctaacttttaaacactgtattggaggtttttttttaatttacagatcatatttattttactatttttgtagaaaattattaattttgattgtatttttgtattttaaaagcttcttcacttgtgttccctaaatattcatattgctgcccaaaagtatgactgtggaggaaaaaaaaatactttaaaaatccacactttttgttaagaaggaaacatttagcatttatatatttgtgtatggaaaacacttgatattttatccctgttgcatctggctgcacagagcctctcctcaaagatgctacaaaacttgaatataacacattttggaaggctgactaacctcgattctgtgttgtgatgtgcaatactgnttctaatgtttgnataaaaaaaacagtgtaaaacctttttaatgcaaatttatttttttcattgcatattttgcagattttatccacagtgtcatt

SEQ ID NO: 859 - DNA, 520 bp, Homo sapien
acacaggattggacccagttagacaaaatgaacatacttgtttaggaaaattgcattgcaaaacaggcagaggtgctgtgcagtgattcctatggaattgattggtcccctaggggatgtttagcttgaattgcacctcagtctgcgtgccatggccacactatgttcagctggtctggacaaaatggtcagatggtagaaatggtaagaagtatgacaagagttcctattatctggaaccatggcagtatagtggcacctcaacctcaaatgatatggcccattgtaggagctaaacaaggatttgtggaaattattaatagctcttaataaaatcaaaatttaggaaagaataaaaaagcatctagaaggccactctacaaacttgtctttggatattgcaaaattaaaagaacaaatatttaaagcatcacagccacacttgaccttaatgccaggaactagagtgctcgaaggagctgcagacagattagcagctagtaacctattcaaatggaga

SEQ ID NO: 860 - DNA, 173 bp, Homo sapien
  misc_feature (1)...(173): n = A,T,C or G
acacagacaaatttatgcgaccagggcagaggctgtagatgattcatatttccaattgggagggaggactcgcttggtcttataatatcgagccaaacggtgaatccggctctctattanaatcagacggaatttagcatccttatcctttctgttcctctcaagatgctttc

SEQ ID NO: 861 - DNA, 323 bp, Homo sapien; identical to SEQ ID NO: 593

SEQ ID NO: 862 - DNA, 320 bp, Homo sapien
  misc_feature (1)...(320): n = A,T,C or G
acagcaaagcgacccttggtgtcatagatcagacggaaattctctcccgtcttgtcaatgctgatgacatccatgaatccagcagggtaggttatatcagttcggaccttgccatcgattttaatgaaccgctgcatgcaaatcttctttacttcatctcctgtcagggcatacttaagtctgttcctcaggaaaatgatgagggggagacactctctcaacttgtggggaccggnggatggacgaggagcaaacacaccggtcaatttatccaggcatccaatgctttggagctgccacccgcttcagatgctacctgc

SEQ ID NO: 863 - DNA, 277 bp, Homo sapien
actgatgaagtatcgagtaaggaggagttaccaaccacaaatgtagctctgtttggggtatctgtttcagccactaagggttttataacctcaacttttctttctcggtttatccctgtctcttcctctactgaatcacatttctggttatttctgaccagcataggttcacgtctacaacaattgtctgggactttcttttgtgtcactacaggagatgtgatagggttttttaatgagagtgtagattctgtctctgtttgttcaaagaagatgt

SEQ ID NO: 864 - DNA, 407 bp, Homo sapien
acttcctcaatgtatttgggcttcggagcatttactctctgattctgggccaagataatgccgctgaccaatcacgaatgatgcaggagcagatgacgggagcagccatggccatgcccgcagacacaaacaaagctttcaagacagagtgggaagctttggagctgacggatcaccagtgggcactagatgatgtcgaagaagagctcatggccaaagacctccacttcgaaggcatgttcaaaaaggaattacagacctctattttttgaagaccgagcagggattagctgtgtcaggaacttggagttgcacttaaccttgtaactttgtttggagctggcacctcttgaaataaaaaggaggatgcacgagctggcaggcatgcaaaaaaaaaaaaaaaaaaa

SEQ ID NO: 865 - DNA, 195 bp, Homo sapien; identical to SEQ ID NO: 8

SEQ ID NO: 866 - DNA, 242 bp, Homo sapien
acaaagttaaggaggtagggaggatggtggggaggagggggcggactaccctgcaggacgcgggaggctgctcagactgtggtgatgtcaggaagggccgcacactttggcatggacgatgcactaaaaaaagagaaagggaattctaaatccctcttaaccagctggagagggaaggacgcagggccagggtggggacaagtgttggcttcggaaggctctgagtggtggggccggaatgt

SEQ ID NO: 867 - DNA, 419 bp, Homo sapien
acctacacacgtcgtgcattagcctgtatggttttgctgtctaggatctattttcaatataatacagagtcaaagcaatgaaatggaaaccaaagggttaaactagttttgtgggttttatttcctccgaagtctaaatgttcacatttctgattagaataatgtggtttataattaattttcatgaattattcataacacttaaggtaaaacaaaaaagctgatattggttattttggttattatagctctatagcttacactcaacatttaagggtgaaaaccgcatccattttgttaatgctgtgaactgcagaagaaaaatttttataatataaatttttaagaaaaagttaatacaaataaatgtaacaactaaaataaatgtataatgccatggctaatgatttgcatataag

SEQ ID NO: 868 - DNA, 404 bp, Homo sapien
  misc_feature (1)...(404): n = A,T,C or G
acgattatagttnggatatgtggagtttgggttgtatgctggcaagtatgatctttcggaaggagccatttttccatggacatgacaattatgatcagttggtgaggatagccaaggttctggggacagaagatttatatgactatattgacaaatacaacattgaattagatccacgtttcaatgatatcttgggcagacactctcgaaagcgatgggaacgctttgtccacagtgaaaatcagcaccttgtcagccctgaggccttggatttcctggacaaactgctgcgatatgaccaccagtcacggcttactgcaagagaggcaatggagcacccctatttctacactgttgtgaaggaccaggctcgaatgggttcatctagcatgccagggggcagt

SEQ ID NO: 869 - DNA, 602 bp, Homo sapien
  misc_feature (1)...(602): n = A,T,C or G
acaatcatgcctctttgcccatccgttatctatgactcctgtcaccctacaatggcagagttgaatagctgtaatagagaccacatggcccaacatattcgctatctggcactttacaggaaaagtttgccaatctctgctttataccatgaccagaatgccctgatactcaaatctaatcttgtgattcccctgctcaaacttttccactgtgttcctgcagaaaacattgctggcttcctatgcatagtcattatttattctttattgctgtagaaacacaagttcatttagatatttactattccgttacccccatccaatcttaaaagaaaaatcattattctaagctaatcacagtaattacatttgctttcctagtgattggtatagaaataagcatgtggtataatccagccaataaaatgttacaggaagattactgcaagcttccaagttttcttcctatttaaaaaaaaaaatgtgaacaaaagcagcacccccagccttcagatattgtcttgagttagcatgatgattggagctgttgctaattagccaaccangaaaggagacatggacnaaacactgccgatagcaca

SEQ ID NO: 870 - DNA, 195 bp, Homo sapien; identical to SEQ ID NO: 8

SEQ ID NO: 871 - DNA, 285 bp, Homo sapien
  misc_feature (1)...(285): n = A,T,C or G
acctggctttcctccncaagcggatgaacaccaacccttcccgaggcccctaccacttccgagcccccagccgcatcttctggcggaccgtgcgaggtatgctgccccacaaaaccaagcgaggccaggccgctctggaccgtctcaaggtgtttgacggcatcccaccgccctacgacaagaaaaagcggatggtggttcctgctgccctcaaggtcgtgcgtctgaagcctacaagaaagtttgcctatctggggcgcctggctcacgaggttggctggaagt

SEQ ID NO: 872 - DNA, 241 bp, Homo sapien
actgcctccctcttcaatgctgccaactggatggagtccagttcctgggatggtcgttatgccatggtggtctgtggagacattgccgtctatcccagtggtaatgctcgtcccacaggtggggccggagctgtggctatgctgattgggcccaaggcccctctggccctggagcgagggctgaggggaacccatatggagaatgtgtatgacttctacaaaccaaatttggcctcggagt

SEQ ID NO: 873 - DNA, 179 bp, Homo sapien
  misc_feature (1)...(179): n = A,T,C or G
acaatggaatatcattcagccttacaaaaggagatgctgctatatttgcaataacatgggtgaacctggaggacgttacgctaagtaaaataacaatattgaaggaaagaaataatactgaaagaaaaatattgcttgatctcacttatatatggaacttaaaaactncncatagaaac

SEQ ID NO: 874 - DNA, 511 bp, Homo sapien
  misc_feature (1)...(511): n = A,T,C or G
caagctttttttttttttttttttttttttttttatttcatctctttttattacttgacctaccattaagacaatctataacaaaaaaagtatattagcacacatggtataatcagactggtaatcaggaagcaatacaaaacggncctttggccatctatactttctagagcagtaaatctcataaattcacttaccaagcccaggaataatgacttttaaagccttgaatatcaactaanacaaattatgccaattctgatttctcacatatacttagattacacaaagataaagctttanatgtgatcattgtttaatgtanacttatctttaaagtttttaattaaaaactacagaagggagtaaacagcaagccaaatgatttaaccaaatgatttaagagtaaaactcactcanaaagcattatacgtaactaaatatacatgagcatgattatntacatacatgaaactgcaattttatggcattctaagtaactcatttaagt

SEQ ID NO: 875 - DNA, 332 bp, Homo sapien
actcaatattataaaaacctcaaataattgacttgattttacacaacatccttcccttttctacaagttaatttttttacaaatcatttgggttatctcctaaataggttatattttattgcttctagaaacaatgtttcaaaatatatgtgcattatcagtaataatttgtataaatatttcccacaacaattttcataattttcaaagactaatttcttgactgaagatattttgctagggaagtgaaactttaaaattttgtagattttaaaaaatattgttgaatggtgtcatgcaaaggatttatatagtgtgctcccactaactgt

SEQ ID NO: 876 - DNA, 446 bp, Homo sapien
  misc_feature (1)...(446): n = A,T,C or G
acggtaacatgctgtccaggtttgtagcctaggagcgataagctgtatcattgagtctatgtgtataataggctataccatctaggtttgtgtaagcctactctatgatatttatacaattatgaaatcacccagcaacccatttctcagaacttatcccagtcattaagcaatacatgactatattattatcactaacttattttgtggctttgataagccgaatatgggaaaataaacatttactgaagaaaaggcagtctatacatcaagttttggtaaaagaaataagtttttttttgagacgaggtctcgctctgtcacccaggctggagtgcagtggcgcgatcttggctcactgcagnctccacctcccaggttcaagcaattctnccacctcagcctcccgagtagctgggattacagctgtgcgccatnatgcctgg

SEQ ID NO: 877 - DNA, 563 bp, Homo sapien
actctttggaggagcaaaggaacaatagaacctagagtttcttttttagggggagataagggtcttgctgtgttgcccaggctggtggctggtctcaaaaatgacacattgaatacaagggaacaattcaaatgaccatcactgatttctcaacagaaacaatggaggccagcagacagtgaagtctttaatagaagaaaaaaacctgtcaatctataattctgtatcctgcaaaactgtccttcaacaatgaaggtagaatagacatttcatacaacagaaagctagaattgatccccaatcaacctgcactccaaactaaagttagttcttcaggctgaaggaaaatgttatcagatggaaactcagatcttcagggaaaactgacactcaaactggtatacatgagggtaattataaaataccattttttattttagtttcctcaaaatgcacagaattgttaaaagcaaaacctatttaaagtaaaatcttatttggggctataagatgtagatgtaaaatatatgacaactactgcataaagcagaggtcagcacact

SEQ ID NO: 878 - DNA, 482 bp, Homo sapien
  misc_feature (1)...(482): n = A,T,C or G
actgattttaaaaactaataacttaaaactgccacacgcaaaaaagaaaaccaaagtggtgccacaaaacattctcctttccttctgaaggttttacgatgcattgttatcattaaccagtcttttactactaaacttaaatggccaattgaaacaaacagttctgagaccgttcttccaccactgattaagagtggggtggcaggtattagggataatattcatttagccttctgagctttctgggcagacttggtgaccttgccagctccagcagccttnttgtccactgctttgatgacacccaccgcaactgnntgtctcatatcacgaacagcaaagcgacccaaaggtggatagtctgagaagctctcaacacacatgggcttgccaggaaccatatcaacaatggcagcatcaccagacttcaagaatttagggccatcttccagctttttaccangaacggcgatcaatctttt

SEQ ID NO: 879 - DNA, 321 bp, Homo sapien
acagagttttatataaatttaaaccaatttttaaaacaaaactgcggacaccaccataaaaatggaatcaaaagaaagttaatttatgaaattaagaggtcagcagaatatactcagtgatggaagacacttgggaaagtctttttaatagaacaagaacgatcttaatttaagaatattatcctggtttaacaacagtgccctgtttacaacagattgtgccctatctcatctgcagccgaggaataaaggattctgattagaaagagggttgcctacagattagtaagcaattccttggatcttatgcacagaacttgt

SEQ ID NO: 880 - DNA, 180 bp, Homo sapien
  misc_feature (1)...(180): n = A,T,C or G
gccacctgcaagatggacacgagccacaagctgcactgtgaacctgggcactccgcgccgatgccaccggcctgtgggtctctgaagggacccccccccaatcggactgccaaattctccggtttgccccgggatattatagaaaattatttnnatgaataatgaaaataaaacacacct

SEQ ID NO: 881 - DNA, 279 bp, Homo sapien
accacgtggttgaaattggagccagctgtaaacatggccgccttcctcagacattctccgaagaccaccatcagcagccctgtgacactgagccaggtaatctgcttcagttctggccaaaagatattttcaagtatgaactctaaccaagaagaaagagcagctactgtatactccaggctgtgattcaggagaaaggaatccaaggacagactttgggattattgactgctgtcaccaagtattcagaatagtggaacaatgacagggagcacatgt

SEQ ID NO: 882 - DNA, 207 bp, Homo sapien
  misc_feature (1)...(207): n = A,T,C or G
acatgtcaaatgccttctgtcccagcacagctcccgtggttccattcaccagggcgatgtttaggcctctgcccacattgtttttcacaggactcatgatcatgcggtcttcaaagcacatagtagggcccacgacgttggcggccccactgcagattttaaacgcaaagtanttggctgggcagggcttgatgaggccacacttgt

SEQ ID NO: 883 - DNA, 375 bp, Homo sapien
  misc_feature (1)...(375): n = A,T,C or G
actgtaattatacaaantccaaagaataaaatgttactagttacactcgttaaaatgaaactgacaaccaaaagaataacaaaacaaaaagaaatctctgtcagaatccatagagacatttgacaatattacaaaaaaaagtagtcaaataattgtcccagcatgctgcagttcattgccataacttcataaattcccagctctttgggggaaagaaagtgcgtttttcacagcctatatagttcttaaagaaatagctctcacatgtatgcaggtcaacagaacaaggaatgcaaagtctaggcaccacgattgctcagacagcaacagagtttcaaagagtccaacttgacactcttctgaaccagatgtggt

SEQ ID NO: 884 - DNA, 477 bp, Homo sapien
  misc_feature (1)...(477): n = A,T,C or G
acttagaaccagaatnncatactgtataatttagtggacttagttatttcaaaagatattattccacttccctgctaaatgaaattaatcatcacctttgactttcaagaggtgaaaatagcgtgtaataaagcatatcttttagtcatcaggcctactgtgaaaagcaaatacagactgnatatattatatactagctgttattttttgcttcaattgtattttatctcttttgttaaaaaaacatgatttcatcttgtaactgaactgcacatataatatcagagaaaatcttctaatggcatgacttgtaaaatctctaccccaacaaattagtttgatatctaggagttaccttatctgaaacataatgagttatgttctacagtgtctgccatcaaactttaaacaaatcaggtccctctttcagntaagtatgttgntatactgaatncatgagtgttatggaaaagattt

SEQ ID NO: 885 - DNA, 310 bp, Homo sapien
  misc_feature (1)...(310): n = A,T,C or G
actactcnattgtcaacgtcaaggagtcgcaggtcgcctggttctaggaataatgggggaagtatgtaggagttgaagattagtccgccgtagtcggtgtactcgtaggttcagtaccattggtggccaattgatttgatggtaagggagggatcgttgacctcgtctgttatgtaaaggatgcgtnnggatgggagggcgatgaggactaggatgatggcgggcaggatagttcanacggtttctatttcctgagcgtctganatgttagtattagttagttttgttgtgagtgttangaaaagggcgt

SEQ ID NO: 886 - DNA, 548 bp, Homo sapien
acatataaatgaatctggtgttggggaaaccttcatctgaaacccacagatgtctctggggcagatccccactgtcctaccagttgccctagcccagactctgagctgctcaccggagtcattgggaaggaaaagtggagaaatggcaagtctagagtctcagaaactcccctgggggtttcacctgggccctggaggaattcagctcagcttcttcctaggtccaagccccccacaccttttccccaaccacagagaacaagagtttgttctgttctgggggacagagaaggcgcttcccaacttcatactggcaggagggtgaggaggttcactgagctccccagatctcccactgcggggagacagaagcctggactctgccccacgctgtggccctggagggtcccggtttgtcagttcttggtgctctgtgttcccagaggcaggcggaggttgaagaaaggaacctgggatgaggggtgctgggtataagcagagagggatgggttcctgctccaagggaccctttgcctttcttctgccct

SEQ ID NO: 887 - DNA, 222 bp, Homo sapien
  misc_feature (1)...(222): n = A,T,C or G
actgattattaaaatgacatgtanttatcagagaattcactgacgtgtggcttaatacatgtaaatctagacctctgacatcatggtgntttcttaatgcctcacattgctggcacggggatgtgccctgcctgccagcacctangacttcnngttgggttgcagcttatgacatgcatgataggttntggaaggtaacttttaactgcaaacctataaagt

SEQ ID NO: 888 - DNA, 439 bp, Homo sapien
  misc_feature (1)...(439): n = A,T,C or G
acagcattctggaataaagcaagagtgttcattcacacacacagtagcttcaaaactgttcgatctgtttgttcccatgtagttttctaaagatggaaaaaaaggactttggtcatcaagactactgtggccatattagattactggaacatctaagcatcagtgtgtgaccatgcgaacaaaagacttcgtggagtgtctatttttaaaaaggtttatgtgtgtcgaggcanttgtaaaagatttactgcagaatcaagcccacttttaggcttaggaccaggttctaactatctaaaaatattgactgataacaaaaagtgttctaaatgtggctattctgatccatagttgttttttaaagaaaaaaaatgtatatacagaaagagtataaaantttgtgaatttaatgcaaattagcttccagtcttnacttccc

SEQ ID NO: 889 - DNA, 577 bp, Homo sapien
actactaaattaataaatttattccacttttgaaatgacagccaaaaatccacctaattgattctcatttggcacgttcttctcaattctgttcactaaattaaaattactaaatttaaactgccaagagccatgatgttgtctgcacaagacaacattttccatcactttcagaaagttatatttggcacgttaaggaaaaaaatataatcccacagcagcagctatttaaaataagacagccacaggattcatgcagaatattttaaatattcctgttgaacacaatgatttaattgattttttcttcacggattatgctcccaaacatcctatatgcatccatggaaatttaaagatcctggaatagcgtcttccatgtgggacatcttaaaagatagtattttggcttcagtgagttacacaaatgaatcaccagtccttattaattcaatgggtctgtttacagagtgtggtaatttcgttctttagatttgcagaatttataaagaaagaaaattacagcctgcacacccaagaccaggacaattcctccaatgaaactggctgcatcaaa

SEQ ID NO: 890 - DNA, 364 bp, Homo sapien
acacaaagagggggtgggtgtcggatgcagagtgtgtggcctgatgctccacggcgtgcaggacggggggctaatagtaggtttccttctccacccagccgccagggcgtcgcctgatgatgagttttctgacttcgtcatatacgaagatgagaagagagtaggggaaggcacagaaccaccaggtaggtttgaggggatacatcctaagagcaacacccattccagggcagtaggaaaggaaagcagccagggctgtctcttcaaagaggccaaatatcaagatcttgttcttcatcccctgctggaagaccgaattcctcctggtcttacagatgaccaagtcggcccactgcaccaccac

SEQ ID NO: 891 - DNA, 456 bp, Homo sapien
ttggaatccctgttgctacattgactaaaaggtcatgatgaatggaatatgtaagacttggctcatagaaacctaatcagatggttagaggtgttggcagtttaggacctgctgtcataaatgtgtgaacaaccttttgtaacctaacctattgacctgcatgttttttctttaccccaattcattacatggaggctcaatcttgagtttgctttactggttcagcaaaagccaggaagaacaactttgtagtaatcaaaatgttatccaactgtatattgtttactttattgtaaatactggtgaacagtggttaataaatagttttatattcctttatgcaattattagacttttttctttatttgatatgcctttacagtagaaatagaaatgcccacactcattggattatctttgtttataagttagatgataccagtaaggcattacagt

SEQ ID NO: 892 - DNA, 242 bp, Homo sapien
actgtaacctgatgccagatgctatgggcgtgatgagaactagagcattgcagcatggaggaaactgtgaggcaccagatcctgtgcttctgcaggccattttctgaaaacccctgttaggaaggttggatttggcgtgacttgcttgagcaagagtcctggggagagattttgaggtttaatttaacggtatatccagagctaacagtgactcaactcgtctagttctgcaagtcagatgt

SEQ ID NO: 893 - DNA, 473 bp, Homo sapien
acaaagcagcaactgcaatactcaaggttaaaacattagaaaagcatttgtgtgacaggtatattacagtattatcaaaatattacattttcagacttacttagcagataatcatccaccagagcttaaatctttaaattatttccatagtcttaaaaaatatgtaatgtcagaatgcatataaaaagaatgtaaaaggaaacctaaaatacaaatggaataatgtaacaaataaatatttgatttcagtaactgttaataatcagctcaacaccaccattctctctaaactcaatttaattcttataggaataatgaactgtcaaatgccatggcataattatttatttccaagctatcatcaatgattagaactaaaaaaaatttggcataaaaaaatcacaattcagcataaataaagctatttttagcttcaacactagctagcatctctaagaattgttgaaataagt

SEQ ID NO: 894 - DNA, 500 bp, Homo sapien
  misc_feature (1)...(500): n = A,T,C or G
acctctttagtcttcatcagatttgtttttctctaaaagtgccaccttgtggaatataccggaataaaacaagaaagctcatctcttaggacagtgtgaatgtttagaaagacttttgcaagaaaagtcaccttcctttcctaccacatcaacttcaaattgctgtaacagtatttcagcagatgctcgaaaagagcctgtatttattttcaggtggctcttgttttcttcctaaggctagacaaggtaacaatatgttgaaggaagtccacttctactcatttagctaaacgttatcacttcctggaaatgctgagaaatagaaaacattttgaaaagctgattggcacttcattaagaaaataaaaatccccagaaaggctacttgagaaaaaaacgtgtaaaaattggaccccttctgtttttacatttctgntgcttacaaaggtcagaagatagagagaccaaaggattatttttggtttattttctgaaaaagt

SEQ ID NO: 895 - DNA, 457 bp, Homo sapien
acaagatttttaaggagagttaacaaaggtttaaatagatgacaaaaagggacttggtgacagatagtatttgccaatcaaattattcaacaggttttgaagggcgtgtgctaaacttctaaggtgaatcctgacgtggattactggattaccttttttgttgttttatttcacccaagtgcgtctatgtcatttacctaagtttttatgtgtggagtattctttgtaggagaggaaagataacagctgtagtctgattaacagtttttagtatctcacaatgaaaaataaataatgtgacttaaacattttgcatacttaaatttacatagagttttagcaagaaaataaggcatgactgataatggctcaggaaagttctaaatggtgtaacagactagatcttattaaagttccaaagaatttattatcaaaactaaaacaaaacttcagttgt

SEQ ID NO: 896 - DNA, 595 bp, Homo sapien
actctgccttttaggagatgaggtaagacatatacatagatggcttttactagccaaggcaatgtaaatggactaagattctcatgtgacttgaggttatctgatgaatttattctcttcaaaaccacctacttttagagggcatgtttaacccctctctttatttaaggagggagagaaaaacacatgtaaccagaattcagagtgggttactcaacctaagagaacatacggagttctctttgggaaaacgacaagactacagtgttcacttcgcaccatgaagtggcactcctgttatggctgtcagagtcctctcacttcttatgaaaggatgcatctgattctgaaattactgatatattcgatcagttagggatgttttaaaaagtgaaaacaaatgccacacatacactttctagctttctgaaatcaccgaacacattacaaaaaatagagaatttaccctattaacttttagagaattttccaataatattcttggttaaagaagccaagtttgtgcatattcccaattttcagtgttcttgtttttatgcacaagagccaaagtagtatacacatattttacctc

SEQ ID NO: 897 - DNA, 559 bp, Homo sapien
  misc_feature (1)...(559): n = A,T,C or G
ggcgggtggatcatgagatcaggagatcgagactatcctggctaacacggtgaaatcccatctctaataaaaatacaaaaaattagccaggcgtggtggcatgcacctgaggtgccagctactcgggtggatcatgagatcaggagatcgagactatcctggctaacacggtgaaatcccatctctaataaaaatacaaaaaaaaaaaaaaaaaaagaatgaagatgaccagtttacataatttatctaataacttccactttttgaaatatatctaagaataaggaattaaaccaaatacacaggtgccaacattggtttacagttatactaaagctcacatacataggtcataatagttctacaagtcctgactgtaggcccttagtctattttggattaagttctatagcagaattgtttggtttaccaaaaataaagtcagncatggacagttgcaacaaataataaactggtctgatagcaaaggaagagatgttaaaaactacctaagagaccatgtggggccccatttgcctctgtgatgtgntatgctata

SEQ ID NO: 898 - DNA, 434 bp, Homo sapien
cccggcctgaggtgtcggccggatccctccttctcccggcgcctcaagcggaagaccattcctcaagaattttgtatccaaggcccaaaagtttgttacccaagatgatgaatgctgacatggatgcagttgatgctgaaaatcaagtggaactggaggaaaaaacaagacttattaatcaagtgttggaactccaacacacacttgaagatctctctgcaagagtagatgcagttaaggaagaaaatctgaagctaaaatcagaaaaccaagttcttggacaatatatagaaaatctcatgtcagcttctagtgtttttcaaacaactgacacaaaaagcaaaagaaagtaagggattgacacccttctgttttatggaattgctgctgatcattttttctttaaaacttggatagattccaaaagttacagt

SEQ ID NO: 899 - DNA, 276 bp, Homo sapien
acccagttcatggtaatttgttacagcaatcctaggaagctaatactctgacagaaaaaaatcttggataatatgcatgagaaaaatccttcaataaacacaaaattggtttcaaaatgttttcatgtaaaaataaattaacttttctgtaattagattgtgttttatagtaattcttgcctgcttcttagtctttgttgtaggatgcataataaaatacatgaatgagttttaaatggttagctttggagaatggttttgggaagttcctacagt

SEQ ID NO: 900 - DNA, 302 bp, Homo sapien
acacaattatcaaagctgatattgaacacaaacaaattgatacaattcagtaatccgataatattcatagtcaaataagttactttaaattgcatgcaatacaactttatgttccatagcatctttaataaaaaccgtttaccaaaatggctcttcaaacttaaaaagtgcaattacagagtgcaaaataaaaagaaaatacattatattacatttaacatcatcaaatttgaataacagatatttaaatgaaattactctttttaaaaacattaaaatatacaccagaaatactgtttgta

SEQ ID NO: 901 - DNA, 404 bp, Homo sapien
gttgaacggctgtgggcgtcttgctgccttgggtagggggttaaaatcgttcttgagaggaacgtctctgtgcgaagagataatgagtttagctctgagaagtgagcttgtagtggacaaaacaaagaggaaaaaaagaagagaactgtctgaggaacagaaacaagaaattaaagatgcttttgaactatttgatacagacaaagatgaagcaatagattatcatgaattaaaggtggcaatgagagccttggggtttgatgtaaaaaaagctgatgtacacaacaaatttatgtctcagctacatgatctaaaagttaaaggtcccaggagccccatcctgaacttggaaagtgtagccttcagaggtagtttctggcacaacgttttgatcttcctcttcc

SEQ ID NO: 902 - DNA, 474 bp, Homo sapien
  misc_feature (1)...(474): n = A,T,C or G
acttatttcaacaattcttagagatgctagctagtgttgaagctaaaaatagctttatttatgctgaattgtgatttttttatgccaaattttttttagttctaatcattgatgatagcttggaaataaataattatgccatggcatttgacagnncattattcctataagaattaaattgagtttanagagaatggtggtgttgagctgattattaacagttactgaaatcaaatatttatttgttacattattccatttgtattttaggtttccttttacattctttttatatgcattctgacattacatattttttaagactatggaaataatttaaagatttaagctctggtggatgattatctgctaagtaagtctgaaaatgtaatattttgataatactgnnatatacctgtcacacaaatgcttttctaatgttttaaccttgagtattgcanttgctgctttgtg

SEQ ID NO: 903 - DNA, 168 bp, Homo sapien
  misc_feature (1)...(168): n = A,T,C or G
acatgaattattccagttntaaagtattatgcatgtttgtttaataaatgtggcatggttttaatacaaatgctatgttatttaaaagttagaggaacatttctattgacaaaaatatgcttcatttacatataatgttaccatatggtgataatgattaaattagat

SEQ ID NO: 904 - DNA, 272 bp, Homo sapien
  misc_feature (1)...(272): n = A,T,C or G
gaatttctcttcnntgccattgaaacgatgccttgtgtcaagaagaaggcanactgggccttgcgctggattggggacaaagaggctacctatggtgaacgtgttgtagcctttgctgcantggaaggcattttcttttccggttcttttgcgtcgatattctggctcaagaaacgaggactgatgcctggcctcacattttctaatgaacttattancagagatgagggtttacactgngattttgcttgcctgatgtttaaacacctggt

SEQ ID NO: 905 - DNA, 297 bp, Homo sapien
  misc_feature (1)...(297): n = A,T,C or G
acagatctccagaagnnttgctggggtcagctcgttactcaactccagttgacatttggagtataggcaccatatttgctgaactagcaactaagaaaccacttttccatggggattcagaaattgatcaactcttcaggattttcagagctttgggcactcccaataatgaagtgtggccagaagtggaatctttacaggactataagaatacatttcccaaatggaaaccaggaagcctagcatcccatgtncaaaaacttggatgaaaatggcttggatttgctctcgaaaatg

SEQ ID NO: 906 - DNA, 465 bp, Homo sapien
acacttctgtcttcaaactgtatcttctttggatggaattaagatgtaactgtatagttttaagataaataaatgggaagttggtccaactaagatgacagcagatatattacatgcaggatttaatattttctaattctctcttttaaaaaaaaggatgctgttggattgggaaaaaaaaagtcaaaaaagaacccagattcaatatataaaaatgtcccacaataggtcgacaatggcagtaaaaataagaggaaaaaagtaatctttctggaacatcatttttcaataacatagaaacactaagtgccaggaagattcctattcatgtaattttagcatccaagtttccctctatttattttattggaacaaatgctttaaataaactatttgtcctcttcactgaagagagctggtctatttcatctttaatgagctagtttttgggaagattagccatgt

SEQ ID NO: 907 - DNA, 503 bp, Homo sapien
  misc_feature (1)...(503): n = A,T,C or G
acctgtgggtttattacctatgggtttatatcctcaaatacgacattctagtcaaagtcttggtaatataaccaatgttttcaaatgtattctgtcatacaaagagcagatttttattgaacttgtgcaataactatattaccatacaatataaatattcatgaatagtttcccaagtctggagcgaccacatagggagaaaatgtaaatgtctcaatttttgttcacaaaagtatattttatcaaattgctgtaagctgtggatagcttaaaagaaaaaaagtttcctgaaatctgggaaacaagacatttaaagaatcagcaaaatttcaaataaaaaattatgaaaatattatcctcattagttcatttagtcccatgaaattaattattttctctgcttgatcttggtggacagtttcatgaagctgncantntagttcattaaagttttggaaattctcagacagtgcaggtggtatcagaaacttgtattcaagagt

SEQ ID NO: 908 - DNA, 467 bp, Homo sapien
  misc_feature (1)...(467): n = A,T,C or G
acataataagattttttaaaatctattgccattcatttatttttgcacaaaaacgtataaatatgtcaccagcttttcttaacttaaaaaacttaaataaaagacaccagatgaaaactaccctttgctgccatttttttttaagtttttttgtaggggttttttattttttgtgtttttttttctttttctgcttagaattgggtttctagggaagaaaagcccctgcattaaaaacagcccatttaaaaaaaaaattcaaagttctgatgaattccgggaaaaaagcaaccccaaagtggtaaaagattacaaatatctactttacaatttgncttctcaccaagataattttatacaagtttacaatcttcatcttcttatgctcttcaaaaggccttgagaattttcctttctgattaagaaaaaatagcactgcaatatttttaaagtcaattttacactgt

SEQ ID NO: 909 - DNA, 442 bp, Homo sapien
acatcatcaaggctccctttgcactcccaagaagaactggtaattttaaacaaaagtatgtgtctttatttgtattggaaaatactgtctttaaattgtttcttgttgacactccccacaatggaaaaattaccgaattaaacctgttttatggatggcagcttggagcatagcaagaagttggaggatttgaattccattcccagttctcattgtgttttgtttcttaaaactataataatcggttactgttataaagtttaaaaggtggttttaatgtgaatagcaaattctggtatatcgtgactaacgcttaagaatgcctgtctttgagaggaaggtgttataatattaatgaacagtgccaaatacactgtgcatatctgcaatttaatctttgaatgtatgttactggattagctccctcctcctgtgtgatggt

SEQ ID NO: 910 - DNA, 119 bp, Homo sapien
  misc_feature (1)...(119): n = A,T,C or G
ncgggaggatcctattggtgcgggggctttgtatgattatgggcgttgattantagtagttactggttgaacattgtttgttggtgtgtatattgnaattganattgctcgggggaata

SEQ ID NO: 911 - DNA, 59 bp, Homo sapien
  misc_feature (1)...(59): n = A,T,C or G
nnactgagccaatcccacttaggaatggaaggcttggacatggaagggaggatataaac

SEQ ID NO: 912 - DNA, 292 bp, Homo sapien
acatgcttcggtcagggtcggggcaggtggaagtgtgatcccgtcgaccaatgccaggattcagagactgggacgttttatcaaattggagattcatgggagaagtatgtgcatggtgtcagataccagtgctactgctatggccgtggcattggggagtggcattgccaacctttacagacctatccaagctcaagtggtcctgtcgaagtatttatcactgagactccgagtcagcccaactcccaccccatccagtggaatgcaccacagccatctcacatttccaagt

SEQ ID NO: 913 - DNA, 301 bp, Homo sapien
  misc_feature (1)...(301): n = A,T,C or G
acacaattatcaannctgatattgaacacaaacaaattgatacaattcagtaatccgataatattcatagtcaaataagttactttaaattgcatgcaatacaactttatgttccatagcatctttaataaaaaccgtttaccaaaatggctcttcaaacttaaaaagtgcaattacagagtgcaaaataaaaagaaaatacattatattacatttaacatcatcaaatttgaataacagatatttaaatgaaattactctttttaaaaacattaaaatatacaccagaaatactgtttgt

SEQ ID NO: 914 - DNA, 552 bp, Homo sapien
  misc_feature (1)...(552): n = A,T,C or G
acaaagaatccgnnaagagactattaaatgtgacatgaattatggagtagaaaaatctgcttgatttattaattttatgatatatgtgatcagtatctaatttgatataaaattgaaaatattaaaaaatcattttttttcctcagagttaaaattatttccctcatactaatgcttaatggcaatgattactccagagttttttaatttttacactggggcaatagactaggaggtctctgatttcttcttggtctaaagtgttttgattttatttctacataatagctttggtattcatgtatatacatgcatttaattgtgattttatcacctttcccatttctttccccacaagctggcatttcagtagttgcttttgaataatggttttggttacctgggaaggcaggcccagaacccatttncttgacttgcagttccgggctgtgttcacatgactgctgtctagctgatgcatttttcacatttgtcaactctggttagaaacaggtcctcaggagtatttctctaacctgatattttctaaaa

SEQ ID NO: 915 - DNA, 509 bp, Homo sapien
  misc_feature (1)...(509): n = A,T,C or G
ctcagacatatganncaagctctatataaatccaagacaagcaacaaacccttgatgattattcatcacttggatgagtgcccacacagtcaagctttaaagaaagtgtttgctgaaaataaagaaatccagaaattggcagagcagtttgtcctcctcaatctggtttatgaaacaactgacaaacacctttctcctgatggccagtatgtccccaggattatgtttgttgacccatctctgacagttagagccgatatcactggaagatattcaaatcgtctctatgcttacgaacctgcagatacagctctgttgcttgacaacatgaagaaagctctcaagttgctgaagactgaattgtaaagaaaaaaaatctccaagcccttctgtctgtcaggccttgagacttgaaaccagaagaagtgtgagaagactggctagtgtggaagcatagtgaacacactgattaggttatggtttaatgttacaacaactattttttaaga

SEQ ID NO: 916 - DNA, 372 bp, Homo sapien
  misc_feature (1)...(372): n = A,T,C or G
acaaactaaggatgcngnctatgaggcnntcatgaaagagatggaagggctactgtgacagcttttgatgccagaaaaggcttctgttcacaacagtggcccatggagaaagaggctcttattaaacttanatgaaagagctgcttccattgtcagggtattttctaatttcagttcaaggaatatcctaaaatttagccttgttcanaatttactgcacataaaaaagggtatttcatccagaatagatcagttattgaagcantgctgctaacatccattcccttttcataccaccattttcaccctgtttcttcccctcctcncagttctttggaaatttgtgatcgggggatcttagttgcttatttg

SEQ ID NO: 917 - DNA, 479 bp, Homo sapien
  misc_feature (1)...(479): n = A,T,C or G
acttatttcaacaatccntagagatgctagctagtgttgaagctaaaaatagctttatttatgctgaattgtgatttttttatgccaaaatttttttagttctaatcattgatgatagcttggaaataaataattatgccatggcatttgacagttcattattcctataagaattaaattgagtttagagagaatggtggtgttgagctgattattaacagttactgaaatcaaatatttatttgttacattattccatttgtattttaggtttccttttacattctttttatatgcattctgacattacatattttttaagactatggaaataatttaaagatttaagctctggtggatgattatctgctaagtaagttctgaaaatgtaatattttgataatactgtaatatacctgtcacacaaatgcttttctaatgttttaaccttgantattgcanttgctgctttgtacctg

SEQ ID NO: 918 - DNA, 371 bp, Homo sapien
  misc_feature (1)...(371): n = A,T,C or G
caggaccagctgggnctcaaaactttaaaaacagcaaactggaccaaaaaaatagaacaacagagaagaaaataattagcaagggaatgtcttaacatatagactagatctcttctacagcacataaacttttctagacttacaaaaaaaaaaaaaactctgatatgcccattattatctattatctctaaaaacaatccaacttctcacttggcaatcaataactatatttaatttccttcatgcaaattctcccccatcatgaaataaaacatttaaaatattcatgacaccgagcacagacttcataggttacttagatttaaaatgattatgcacacattatcataatccaattcataatgaatgtt

SEQ ID NO: 919 - DNA, 557 bp, Homo sapien
accagaaacaaaacatgatgagaatacattgaaacactggatttacttaagaaaaacctaagtttttcaaatctaatttatttaagaaaacgtattttcttaataaatgtaacacagttcttacaaggtatggtaataagcagaaagtagaattttgaatattaatgtcaaagtatgttttctgccattttgatggagttgatactttttcttgtaagttcttcctgtagtgaaagagagaaagtgaggtgtcattgccgaaaggacacactaataacctcttggtagtttattgcaggtaaaatcattttttaattaagctgacaacgtggtaaaactgcagcattaaattgtaattatgtttaaatggaagtctttctgtagagtgttaaaggatgataaacgtttgaggttcaaataactcgactgtcttatcaaacaccatgtctataagtaataagtttctgggagaattgtgaattggattttgttttatttcaagtggatgcttttgtgcccatattttaagctgccgttgcttacaagacctgcacctc

SEQ ID NO: 920 - DNA, 503 bp, Homo sapien
acctgtgggtttattacctatgggtttatatcctcaaatacgacattctagtcaaagtcttggtaatataaccaatgttttcaaatgtattctgtcatacaaagagcagatttttattgaacttgtgcaataactatattaccatacaatataaatattcatgaatagtttcccaagtctggagcgaccacatagggagaaaatgtaaatgtctcaatttttgttcacaaaagtatattttatcaaattgctgtaagctgtggatagcttaaaagaaaaaaaagtttcctgaaatctgggaaacaagacatttaaagaatcagcaaaatttcaaataaaaaattatgaaaatattatcctcattagttcatttagtcccatgaaattaattattttctctgcttgatcttggtggacagtttcatgaagctgtcagttagttcattaaagtttttggaaattctcagacagtgcagtggtatcagaaacttgtattcaagagt

SEQ ID NO: 921 - DNA, 282 bp, Homo sapien
ttttttttttggctctagagggggtgctatagggtaaatacgggccctatttcaaagatttttaggggaattaattctaggacgatgggcatgaaactgtggtttgctccacagatttcagagcattgaccgtagtatacccccggtcgtgtagcggtgaaagtggtttggtttagacgtccgggaattgcatctgtttttaagcctaatgtggggacagctcatgagtgcaagacgtcttgtgatgtaattattatacgaatgggggcttcaatcgggagt

SEQ ID NO: 922 - DNA, 221 bp, Homo sapien
acaacaggatgagactctgaaatcactttcagtattccctgctagatattgattgttatttcaagtattaagtgtaagcttttaatggataattagtataactgtggatggcatctgattttgtttttaattctgtggattgtgtttaagcaattcaatagtatgttcctgattttgagatgctaagtggtattgcacagttgtcactttatcaagtgtgt

SEQ ID NO: 923 - DNA, 202 bp, Homo sapien
accattggtggccaattgatttgatggtaagggagggatcgttgacctcgtctgttatgtaaaggatgcgtagggatgggagggcgatgaggactaggatgatggcgggcaggatagttcagacggtttctatttcctgagcgtctgagatgttagtattagttagttttgttgtgagtgttaggaaaagggcatacaggac

SEQ ID NO: 924 - DNA, 615 bp, Homo sapien
acacaagtgatcaatttgtcacaatatgacaagttattgataacaagtattttaacttacaggtatgataaaagtctaacatttacaaaatggggatattactatataaaaaattgaaagtattagtttttatgtaaaatattagtttcttcattctgatacagtgctaaacttaatgtaaagccaaacttcaggacctactctagacataaaataattttcatttccatgtctctagaatctaaaatgctaagtaaattttctctattacttttcgtcaaaataacttaaagtattaaaagacaacctaatgacagtaataacatttttctttcctaaaaaatatttggtatctgatttaaagacatgaataacacaatagtaacaacttaaagatcgacaagatatactaaaaatgatatttgggcatcatatctacataataattgtgaaacaactgttttcctaataactgagaagcaatcagtaactttttcataaaaggactttcatagcttctaaaatatggaattcagcactgtaaagcagaaacactaaacatgtcaaaacacctagcgtggtataggtaaccacaaatctgcaaatgacacactg

SEQ ID NO: 925 - DNA, 467 bp, Homo sapien
  misc_feature (1)...(467): n = A,T,C or G
acaagcagacagtgannnatcatcctgccactaaaaatggtttctgaaaaataatgatgtgggaaaatacaaataattaaatgaaataaaaagaattactaagtttgatctcaagaaacactagaaaatatccttcatatggctctgagngttggaattgtggtgatgttncngtatacantnntaaatttttcgagttttctacaatatgcctatattatatagaatttnctaagatgaattaaaaataaaaaaggctaaagcatannataaccttccccaaacacacaaggattttaaataaattgaaatttcctcatactagtaattttgtgctttttttttacagatcaactggtgagactgcagtcagtgcttttgagattgacaagntgtaacccctgtctttagatttacagtccaatgcttcactcagccattttacctcaccccccaaaaaaaaaaaa

SEQ ID NO: 926 - DNA, 434 bp, Homo sapien
  misc_feature (1)...(434): n = A,T,C or G
actacaggcgcccnccaccatgcccggctaatttttgtatttttagtagaggcggggtttcaccatattggccaggcttgtcttgaactcctgaccttgtgatctgcccacctcagcctcccaaagtgctgagattacaggcgtgagccagtccgcccagcaaggcgggtcttgctgtgtttcccagactagactggtcttgaattccagggctcaagagatctcccacctcagcctcccacagtgctgggattacaggcgtgagccgccacacccagcctattcaaaattttttttcttagagacagggtctttgttgcccaggctggactgcagtgatacaatcatagctgactgaagcctcaaattcccaggctaaggtgatcttctcacctcagccttccaagtagctgggtccgcagatgcatgccagt

SEQ ID NO: 927 - DNA, 544 bp, Homo sapien
aaataagttatggcttaaaatgcttttggagtttatttctcaaaattaaaatctggtcacatgagctttagtttgttttctggtttaaaaaataaaaaggtttctcttaacagtatttccagtgacaatgcaaggtaagtatatcaaaggaaatcaacagttgtgcttgggggctttttgttatgggatattgatttcttgttttttttccgtaacattgtctgctgcaatttaaataaaaattacgacattttaagatatttcatagacaaaccaaacaaaaatatatgtttttactttaaagtgaatgtttttctcttcagctgatctaaaaatgaaagcaagatatcttatgtagaaatattttgataatatttttacagtgagctttcccatgtttttatgtcttaagtttctttgctgcgtttatgtaggttgcacaagaacttttactcacttgtaattgtgcctcagactttttgaaagtctaccttctaaattgccccgacgatctagattctacatgttaccattggtttattct

SEQ ID NO: 928 - DNA, 379 bp, Homo sapien
acagcattctggaataaagcaagagtgttcattcacacacacagtagcttcaaaactgttcgatctgtttgttcccatgtagttttctaaagatggaaaaaaaggactttggtcatcaagactactgtggccatattagattactggaacatctaagcatcagtgtgtgaccatgcgaacaaaagacttcggggagtgtctatttttaaaaaggtttatgtgtgtcgaggcagttgtaaaagatttactgcagaatcaagcccacttttaggcttaggaccaggttctaactatctaaaaatattgactgataacaaaaagtgttctaaatgtggctattctgatccatagttgttttttaaagaaaaaaaatgacctg

SEQ ID NO: 929 - DNA, 523 bp, Homo sapien
  misc_feature (1)...(523): n = A,T,C or G
acaaataatagaatnnccaaaatatgtcagatacagtggaaaatgttcatatgaagtggaagatgaactgtattaagcaattgtaatacaattttagctcttgttatatacatgcctagaaaaatggcaagaagtaacctgttactctgatgggactaattcagtattttttttggcattttctagattttcttaccactaatagcaacttttataacttatgattattattatttttttttaacctttcctaatgaatctttttttttcagtaaaagaaacagtaggtcaacagaggtatattccctaagtggtgcttttattttgaaaatattgtcaatgcaatacttttttcaaaatcgaaaataaaatattttgcctacttattaaaaagaaatagtttttaccttgttctgaggctgggtaatgagaaccaaattgcaaatttgcagaatttttttcctaacattgtcaaacaattggtaatagttgtttttgagattgaacagaatttgatgtgttt

SEQ ID NO: 930 - DNA, 307 bp, Homo sapien
acttaaatgaaaattgatcataggagaaaaatagaagttataaaatgaaaaatgtgacatgtatagatgaaaaataaacatttgaaataaaaattccatgagatagaataagttatggattttaccctaacatcagaaaatttatagaaaaaaatagaagctttccaaactaaaggacaaagggtaaactaaaataagaaagccagaaactcactgatacgtgagacaatatgcagcagtgtaacatacatgtaattaatatctcaaaaaggatgggtgggggaattatagttgaataaagagtggt

SEQ ID NO: 931 - DNA, 494 bp, Homo sapien
  misc_feature (1)...(494): n = A,T,C or G
acacttttgttacagttncatatatgaatagttagcagaggagaaactcctccgttgttcctacaccaagggaaaaaatgtaaggactgtatagctcatgaataatattaacatttttctatcacaaaatattgataaaattggaattgtatcaattcatgttatggagcttaacattttagccgaaatattaagataatataaataaggcttttagcttcatatcaagacctatttgaacacttctagaaaagaacattaaaagttttttcctcatttatggtttgatttagtgtagtgcctcaactgttcttaatggtgtcttagtataatgcataattattagaatataattataaggcattacagaattttatgtggatacttgcaaagatatttcagtccaaaacttcaaattacacacccaaatatgtttgttgccttaatctatacttggacaaaggcaacattttaatttttgctaagtcttaact

SEQ ID NO: 932 - DNA, 195 bp, Homo sapien; identical to SEQ ID NO: 8

SEQ ID NO: 933 - DNA, 162 bp, Homo sapien
  misc_feature (1)...(162): n = A,T,C or G
ttcatggaccnccattcgctgttggcaagaaacggctttacttacaaaacagactctttaccttctgctgtgtttgaagtatgtttagtcagcatgctcaggaaataaatgtgaattgccctggaaaaaaaaaaaaaaaaaaaaaaaaaaaaaagcttgtac

SEQ ID NO: 934 - DNA, 500 bp, Homo sapien
acaaaaaaagcaccagcaactgataaaaattgcttttttgtgcgctacccaactggttaaagccaatgtgatcttttatggtgaaactcctaagaaacaggtggttttgctggaaacttggtagacccttaattatagtggtgctaatgagcactactgtaatataaagccaccattattttttatcaaacatctgaatacattttacaaaggctattgtgagggcattattttgagcatctattttgaggtgatgtttaaaaaaactttaacatcaaatcaaattgtaaattaatttaaatatattgccttaaggacctactaaagaatgtgccaccagactttaagtgatagttgcaatatccttgtctaaaaaaaaaaaaaaaaagttgacttaaacattttctttaacagttgttttttttttctaaattcagtctttctcttgcttttttttccctgctattgaggaagtattttgccttccctactcactgaga

SEQ ID NO: 935 - DNA, 483 bp, Homo sapien
  misc_feature (1)...(483): n = A,T,C or G
acagttagggtnacactttanaggtttattatttttaaaaaacttttcttgaactcctggccggcatggngaaaccccgtctctactaaaaataccaaaattggccgggcgtgatgnngggtgcctgtggtctcagctacttggggggctgaggcaggagaactgcctgagcccgggaggcggaggttgcagtgagtcgagatcgtgctactactgnctgggtggcaagggtgagactccatctcaaaaaagaaacaaaaaaacccaaaaagttttctttactgttggntaaaaaaaaaagccagaccatagtttgactggtggcatggaatttgtgtatcaaataaatgcatttgcttatttgacaaaccatnagtgtccactatttgttaccagagntgggccactatcttttaaaattgctggtgaaaacttgccactagatggcagtgcctgtatagatggggaaaaaattgccaccat

SEQ ID NO: 936 - DNA, 199 bp, Homo sapien
  misc_feature (1)...(199): n = A,T,C or G
actgcggcgggtaggcctnngactgtgggggcaatgaatgaagcgaacagattttcgttcattttggttctcagggtttgttataattttttatttttatgggctttggtgagggaggtaagtggtagcttgtgtttaatatttttagttgggtgatgagaaatagtgtaaggagtatgggggtaattatggtgggcca

SEQ ID NO: 937 - DNA, 546 bp, Homo sapien
  misc_feature (1)...(546): n = A,T,C or G
acagatggggtcttgctatgttgcccaagctggtcttaaactcctggcctcaagcaatcctcctgccttggccccccaaagtgctgggattgtgggcatgagctgctgtgcccagcctccatgttttaatatcaactctcactcctgaattcagttgctttgcccaagataggagttctctgatgcagaaattattgggctcttttagggtaagaagtttgtgtctttgtctggccacatcttgactaggtattgtctactctgaagacctttaatggcttccctctttcatctcctgagtatgtaacttgcaatgggcagctatccagtgacttgttctgagtaagtgtgttcattaatgtttatttagctctgaagcaagagtgatatactccaggacttagaatagtgcctaaagtgctgcagccaaagacagagcggaactatgaaaagtgggcttggagatggcaggagagcttgtcattgagcctggcaatttancaaactgatgctgaggatgattgaggtgggtctacctcatctctg

SEQ ID NO: 938 - DNA, 465 bp, Homo sapien
actcatcttttcccagatgaccaagatgctagacctgctagaggatttcttggaacatgaaggttataaatacgaacgcatcgatggtggaatcactgggaacatgcggcaagaggccattgaccgcttcaatgcaccgggtgctcagcagttctgcttcttgctttccactcgagctgggggccttggaatcaatctggccactgctgacacagttattatctatgactctgactggaacccccataatgacattcaggcctttagcagagctcaccggattgggcaaaataaaaaggtaatgatctaccggtttgtgacccgtgcgtcagtggaggagcgcatcacgcaggtggcaaagaagaaaatgatgctgacgcatctagtggtgcggcctgggctgggctccaagactggatctatgtccaaacaggagcttgatgatatcctcaaatttggcactga

SEQ ID NO: 939 - DNA, 500 bp, Homo sapien
  misc_feature (1)...(500): n = A,T,C or G
actgtcttcccagttncgtccattctttgaattacaagatgatctaaaaccatcttctttttcgccctttcaagaatatcttcttcaactgatccctttgtaactagacgataaatattcacctgtttcttttgcccaattcgatgggctctagcctgtgcctgaagatcattctgtggattccaatcggaatcaaatataacaacagtgtcagcagaggctaaattaatccctagacctccagctcttgtggacagcaaaaagcaaaaatcctctgatccctcagcattaaaatgatctagagcttgtttcctcagttctccttttattgatccatctaatctttgaaaggggaattgacgatatttcaaatattctgcaagtatatctaacatccgcaccatttgtgaaaaaataagaactcgattgcctcgttctcttaggcgaattaatagcttgtcaagaagaatcaattttccgctactacgaattaagtgttg

SEQ ID NO: 940 - DNA, 306 bp, Homo sapien
acgacatctcagacatgacttctattgccaggctggtcaagtggcagggtcatgagggagacatcgataagggtgctccttatgctccctgctctggaatccaccagcgggctatctgcgtttatggggctggggacttgaattggatgcttcaaaaccatcacctgttggccaacaagtttgacccaaaggtagatgataatgctcttcagtgcttagaagaatacctacgttataaggccatctatgggactgaactttgggacacactatgagagcgttgctacctgtggggcaagagcatgt

SEQ ID NO: 941 - DNA, 477 bp, Homo sapien
  misc_feature (1)...(477): n = A,T,C or G
acaaacttacagtanngtatattccaaataaaggtttttcttcctactatggtatgacaatataactgttttctgaatgaagatacatgttaaggcttaaggtgtaaacactttggaaggcaaacagcttagtgaaaaaaattatggttcatttaaaaatgtgtatcatttcataatagacccctgaactttcaaatttacatgtgagaatacatttacatcttaactttctaggaaaggcacaggctttatgtaaaaaagcagcaaagttttaaacccaccaatatattgacaaagccattacttttattagaaacaaataatgcttctcaaggtgttggcaacatgtcatagtatcaacatatacttcatacagtgtatttctccctttaattatattccggtaggaggtggaatacctccttggctatgaggggcagatgtatttgatggactgtgtaggctggttctccttgt

SEQ ID NO: 942 - DNA, 537 bp, Homo sapien
  misc_feature (1)...(537): n = A,T,C or G
actaaaatactgtccnaattttagcatttttattttgcactttgtgtggattgaggtgttcagaaataccaaccataaaaatgtaatctagttggcaaaggtgtgcgctaaaacacggaaccgaacatgcattgatttggataacttttgagggtttttgtcaaatagcatgtgaagagttacatttttcttaaaagattggtggtcccaatgtcagagttcttggaacagataactgaatgatagatttttttttttaaagataaaactttacaacctgcacatttgttatgcatactaaatggtgtgttaaaattagggtttctttgcctctctacactacactaatctgcctaaaggtggttgtttcatatttataatgctaattatcatacctacctactttaaattttaggtagaaaattatctgatttaaatacaaacatatttttctcacattgagtaatatgcataatgtagttccaaatgtatttcattactatagtcacaatatccaactaaaaattacgctatcta

SEQ ID NO: 943 - DNA, 224 bp, Homo sapien
atggcgctgtcgaccatagtctcccagaggaagcagataaagcggaaggctccccgtggctttctaaagcgagtcttcaagcgaaagaagcctcaacttcgtctggagaaaagtggtgacttattggtccatctgaactgtttactgtttgttcatcgattagcagaagagtccaggacaaacgcttgtgcgagtaaatgtagagtcattaacaaggagcatgt

SEQ ID NO: 944 - DNA, 329 bp, Homo sapien
  misc_feature (1)...(329): n = A,T,C or G
acaatataatgtctcntcagcaaaaaaaaaaaaattgaaattacagattatttaaaacagtatcagttttctattccttcttgtatactgacattcttaaccgtcatagcagttgatgcagaaaagccgcatgtcgtgtgttagtaagtgatgccagatacaaatggtttggtctgtagagttaatgtggagctgcactgtggctgcagcaagatcataatatgcgatctgtttaataaaggttagccccatctcgggcacttctaagagtcaagagtcagggtaaccaccagaagtaaatgganagagaatggtgtcangatattggt

SEQ ID NO: 945 - DNA, 360 bp, Homo sapien
acctggggcttttggagaacgtccgagtgcggagggcaggctacgccttcaggcaggcctatgaaccttgcctagaaagatacaaaatgctttgtaaacaaacatggcctcattggaaaggaccagccaggtctggtgtggaggtcctatttaatgaattagaaattcccgtggaagaatactcctttggtagatcaaagatattcatccgaaacccaagaacattattcaaattagaagacctgaggaagcaacgcctggaggacttggccactctcattcagaagatatatcgggggtggaaatgccgcacacacttcctgctaatgaaaaaaagccaaattgtgattgccgcctggt

SEQ ID NO: 946 - DNA, 334 bp, Homo sapien
actcaatattataaaaacctcaaataattgacttgattttacacaacatccttcccttttctacaagttaatttttttacaaatcatttgggttatctcctaaataggttatattttattgcttctagaaacaatgtttcaaaatatatgtgcattatcagtaataatttgtataaatatttcccacaacaattttcataattttcaaagactaatttcttgactgaagatattttgctagggaagtgaaactttaaaattttgtagattttaaaaaatattgttgaatgatgtcatgcaaaggatttatatagtgtgctcccactaactgtgt

SEQ ID NO: 947 - DNA, 396 bp, Homo sapien
  misc_feature (1)...(396): n = A,T,C or G
cctgtgggtttatnanntatgggtttatatcctcaaatacgacattctagtcaaagtcttggtaatataaccaatgttttcaaatgtattctgttntacaaagagcagatttttattgaacttgnncaataactatattaccatacaatataaatattcatgaatagtttcccaagtntggagcgaccacatagggagaaaatgtaaatgtctcaatttttgttcacaaaagtatattttatcaaattgctgtaagctgnggatagctttaaaagaaaaaaaagtttcctgaaatctgggaaacaagacatttaaagaatcagcaaaattttcaaaatnnanaaaattatgaaaatattatcctcattagttcatttagtcccatgaaattaatta

SEQ ID NO: 948 - DNA, 195 bp, Homo sapien; identical to SEQ ID NO: 8

SEQ ID NO: 949 - DNA, 405 bp, Homo sapien
  misc_feature (1)...(405): n = A,T,C or G
acattattcatcgtgnnngcattcttgctaattttttttttggctttggaatgtgacacagcctttttgatcatttctttgatgtgaaaagcatctttggttatcagttaaattgaggtggacattatttccccaatttcacaacaggattcacattgttaatttataaatctagacttggagaattaaggactgagaaatgaccatatcttaaactatctacgacaaagtgaacttaaaaggacatgcccactgaattcaggtcctttgagtaaaaaaaaaatcttctgctgcacattttgtttaagtgttactgtttctgcctgttaatgctgggaacacaaatagtgcaatttgtgcaattggagaatcttgccttttttctnggctccccccaaaaataca

SEQ ID NO: 950 - DNA, 279 bp, Homo sapien
acatagcataaaaactctgcagagaagtattcccaataaggaaatagcattgaaatgttaaatacaatttctgaaagttatgttttttttctatcatctggtatgccattgctttatttttataaattattttctcattgccattggaatagatatctcagattgtgtagatatgctatttaaataatttatcaggaaatactgcctgtagagttagtatttctatttttatataatgtttgcacactgaattgaagaattgttggttttttctttttt

SEQ ID NO: 951 - DNA, 616 bp, Homo sapien
  misc_feature (1)...(616): n = A,T,C or G
acttcagttggtgcacaaaatactgtcatttgctcaaagctggctgccaaatgtttggtgatgaaggcagaaatgaatggcttaaaacttgggagaagagcaaaacctgaaggggccctccagaacaatgatgggctttatgatcctgactgcgatgagagcgggctctttaaggccaagcagtgcaacggcacctccacgtgctggtgtgtgaacactgctggggtcagaagaacagacaaggacactgaaataacctgctctgagcgagtgagaacctactggatcatcattgaactaaaacacaaagcaagagaaaaaccttatgatagtaaaagtttgcggactgcacttcagaaggagatcacaacgcgttatcaactggatccaaaatttatcacgagtattttgtatgagaataatgttatcactattgatctggttcaaaattcttctcaaaaaactcagaatgatgtggacatagctgatgtggcttattattttgaaaaagatgttaaaggtgaatccttgttttcattctaagaaaatggacctgacagtaaatggggaacaactggatctnggatcctggtcaaactttanttattatgttgat

SEQ ID NO: 952 - DNA, 354 bp, Homo sapien
  misc_feature (1)...(354): n = A,T,C or G
acctgtgggtttntccncctatgggtttatatcctcaaatacgacattctagtcaaagtcttggtaatataaccaatgttttcaaatgtattctgttatacaaagagcagatttttattgaacttgtgcaataactatattaccatacaatataaatattcatgaatagtttnccaagtntggancgaccacntagggagaaaatgtaaatgtntcaattttttgntcacaaaagtntattttatcaaattgctgtaagctgtggatagcttaaaagaaaaaaagtttcctgaaatctgggaaacaagacatttaaagaatcagcaaaatttcaaatnaaaaattatgaaaata

SEQ ID NO: 953 - DNA, 419 bp, Homo sapien
  misc_feature (1)...(419): n = A,T,C or G
acctgtgggtttnntacctatgggtttatatcctcaaatacggcattctagtcaaagtcttggtaatataaccaatgttttcaaatgtattctgttatacaaagagcagatttttattgaacttgcgcaataactatattaccatacaatataaatattcatgaatagtttcccaagtctggagcgaccacatagggagaaaatgtaaatgtctcaatttttgttcacaaaagtatattttatcaaattgctgttaagctgtggatagcttaaaagaaaaaaagtttcctgaaatctgggaaacaagacatttaaagaatcagcaaaattttcaaataaaaaattatgaaaatattatcctcattagttcatttagtcccatgaaattaattattttctctgcttgatcttggtggaca

SEQ ID NO: 954 - DNA, 390 bp, Homo sapien
  misc_feature (1)...(390): n = A,T,C or G
acttgtctggtcagctgtgtatgatcagttatctacctcagagtctattttcttttgtgctgggacaggttgctggccctccctgtttccacagaccaaatcctcctagctcaggagctagggctaagcagttatttctttcaagtattttttagttcttaaattttatgcttgtatttgatgatagatgtcagtgacatttcatagtttcaaaagtccttgctgctctgagaagtgtagattctagtgaaaattacatagtcataagagaaatgtgtttttgtttttgtttttgnntcatttttttaaagttgtggtattattggttctatgctccctggaatattactgctttgtgaaagtccagactgaacgcagcaccctctgtgt

SEQ ID NO: 955 - DNA, 512 bp, Homo sapien
  misc_feature (1)...(512): n = A,T,C or G
acctgtgggtttattncctatgggtttatatcctcaaatacgacattctagtcaaagtcttggtaatataaccaatgttttcaaatgtattctgttatacaaagagcagatttttattgaacttgtgcaataactatattaccatacaatataaatattcatgaatagtttcccaagtctggagcgaccacatagggagaaaatgtaaatgtctcaatttttgttcacaaaagtatattttatcaaattgctgtaagctgtggatagcttaaaagaaaaaaaagtttcctgaaatctgggaaacaagacatttaaagaatcagcaaaatttcaaataaaaaattatgaaaatattatcctcatttagttcatttagtcccatgaaattaattattttctctgcttgatcttggtggacagtttcatgaagctgtcagttagttcattaaagtttttggaaatttctcagacagtgcagtggtatcagaaacttgtatttcaagagcacctcg

SEQ ID NO: 956 - DNA, 445 bp, Homo sapien
acctgtgggtttattacctatgggtttatatcctcaaatacgacattctagtcaaagtcttggtaatataaccaatgttttcaaatgtattctgtcatacaaagagcagatttttattgaacttgtgcaataactatattaccatacaatataaatattcatgaatagtttcccaagtctggagcgaccacatagggagaaaatgtaaatgtctcaatttttgttcacaaaagtatattttatcaaattgctgtaagctgtggatagcttaaaagaaaaaaagtttcctgaaatctgggaaacaagacatttaaagaattagcaaaatttcaaataaaaaattatgaaaatattatcctcattagttcatttagtcccatgaaattaattattttctctgcttgatcttggtggacagtttcatgaagctgtcagttagttcatt

SEQ ID NO: 957 - DNA, 574 bp, Homo sapien
  misc_feature (1)...(574): n = A,T,C or G
accttatattgaaaaagtttataaaacataattcctaaaaacaacctcaacattagacaatagaggaaggaaaaacatcagacaaagcctaagttttcacatgagaaactaagtatgttcttaaagctccagtattacattccttgaaaaaactcagaatgcactttggtcattattaaacatatttgaacataggcaaataaaatgaaatgctttctgttgtttttcatagaaagaaaaaacatactacacaatgaggctgaattgaggctgatcaaaaggaatggtaagagcaaagtgatatgacatggctctgttctccacacattcctgattttaagattatgatttagggattagaactgcaccaatcaaataaattatttacaattaatcgtcttaaagttcttaaaatatggtaaaaatatgaggatattccacatgatacactttgcaccaagaaaattctagattgtttcaaataaatttttagaaaccagatgcccagtttaaaaaaanttgcaaaaactgttttcatgtttcatgtaatttctaaaatactcgattgtacctg

SEQ ID NO: 958 - DNA, 502 bp, Homo sapien
  misc_feature (1)...(502): n = A,T,C or G
actacacgcgcctgggcaacgacttccacacgaacaagcgcgtgtgcgaggagatcgccattatccccagcaaaaagctccgcaacgagatagcaggttatgtcacgcatctgatgaagcgaattcagagaggcccagtaagaggtatctccatcaagctgcaggaggaggagagagaaaggagagacaattatgttcctgaggtctcagccttggatcaggagattattgaagtagatcctgacactaaggaaatgctgaagcttttggacttcggcagtctgtccaaccttcaggtcactcagcctacagttgggatgaatttcaaaacgaacaagcgcgtgtgcgaggagatcgccattatccccagcaaaaagctccgcaacaagatagcaggttatgtcacgcatctgatgaagcgaattcagagaggcccagtaagaggtatctncatcaagctgcangaggaggagagagaaaggagagacaattatgttcctga

SEQ ID NO: 959 - DNA, 509 bp, Homo sapien
  misc_feature (1)...(509): n = A,T,C or G
actcattgtcagatgnnccctctgagagcacagaggaggcaaaagcttctgtgggatgtgctagtcggctaaagcttcacagaggaggtggcaattgaaaatgagtcctgaatggggtagggtggttagggaattccatgagacaagacaaggggggcatggtgtgagaaaggcatggaagtnggaaccctcttcctatgacaggagatcattctgcttanagtgganagtgtggagagtgggagtagataattttggaaagctgggtgaagccagttgtggagaattgtttgaatattatcccattgaatacccagagccactaaatctttttttttactagaaaataattngggtccatatgaaagtctctattactgagtagtgtcaatgagggtgtggcaaaatggagcctttcacatcctannggtggccatttggtaatnacagatataagccttaaactatgtaaacccttgtcccaaaggaagtaattgaataaattgccc

SEQ ID NO: 960 - DNA, 220 bp, Homo sapien
  misc_feature (1)...(220): n = A,T,C or G
actcaaaatataagcagctngaaactggctttaccaatcttgaaatttgaccacaagtgtcttatatatgcagatctaatgtaaaatccagaacttggactccatcgttaaaattatttatgtgtaacattcaaatgtgtgcattaaatatgcttccacagtaaaatctgaaaaactgatttgtgattgaaagctgcctttctatttacttgagtcttgt

SEQ ID NO: 961 - DNA, 495 bp, Homo sapien
  misc_feature (1)...(495): n = A,T,C or G
attacctatgggtnngtatcctcaaatacgacattctagtcaaagtcttggtaatataaccaatgttttcaaatgtattctgtcatacaaagagcagatttttattgaacttgtgcaataactatattaccatacaatataaatattcatgaatagtttcccaagtctggagcgaccacatagggagaaaatgtaaatgtctcaatttttgttcacaaaagtatattttatcaaattgctgtaagctgtggatagcttaaaagaaaaaaagtttcctgaaatctgggaaacaagacatttaaagaatcagcaaaattttcaaataaaaaattatgaaaatattatcctcattagttcatttagncccatgaaattaattatttttctctgcttgatcttggnggacagntttnatgaanctgtcagtttngtttcatnaaaagttttggaaattntcagacagtgcagtggtntcagaaacttgtattcaagagt

SEQ ID NO: 962 - DNA, 385 bp, Homo sapien
  misc_feature (1)...(385): n = A,T,C or G
actgtagaatgtttgnnatacagtatttgtaaaattgatatgaaaaataatttctcaaagtctattgtttgatctagttattttaataaaggaactctagaagtttcaagtggccagtgaagtgtgaggaatagagagtaaaggaaataattaataatggtgaccctctgttaagtggtttactttttccattaatataaatttcatttggaaagattaaaaaaacaagtttgattgaacttgataaatcagaaatatttaccagctttgtcgatggtgtattcttgaaaaatgtttggttttctttcaggttgacttatatccaaaattctacaaattcttagctatgttataaatgtagaaagaagtgaaaaatcaaaatatg

SEQ ID NO: 963 - DNA, 539 bp, Homo sapien
acacttggagctaggaaaccaaagcaagctttgtgaaactggcacagtgatagagaattgctgtggagagttatagagcaaagggatgggtccttgaggcctgccagtgtgtaaaggtgttcaaataaagggctgtttctacaggtaacattaaatgtgaactcaacacttccagagtctttaaagggtttctatgtgtatcggtgtaatagtgttttaccaccaactgcctttctttgttcctagttactgtaacaaatatttgatgatagaggtttattaattttgtttatccagaccattaattttatttgtttttgttctatgtaatcaaataaaatttgagtaacatgtaatggtaaggattaatgcatggttatttggaccagaaaaaagtgccatagaagaccaataactgtttagttgaggctagtctggaacctttcattagagcaatatttggttattgcacttcatttttatttactaagaaatgcaattttgggaattttttaacctgttatgctttgttatcaacc

SEQ ID NO: 964 - DNA, 259 bp, Homo sapien
acccagccctgctgcagcgcaacggctcctttgccaactttctctgcaactatgcccccgatgaggaccaagggcacctggaggacagctggaccgcgttggaaggtgcagaggataaggaggcactgctgattgaagacacactcagcaaccacacggatctgacagacaatgatccagtcacctatgtggtccagaagcagtttatgagacagctgagtgccctgtcctcagatggggagggacagggtcggcctgt

SEQ ID NO: 965 - DNA, 418 bp, Homo sapien
  misc_feature (1)...(418): n = A,T,C or G
ctgctaatacaatgccagtcaggccacctacggtgaaaagaaagatgaatcctagggctcagagcactgcagcagatcatttcatattgcttccgtggagtgtggcgagtcagctaaatactttgacgccggtggggatagcgatgattatggtagcggaggtgaaatatgctcgtgtgtctacgtctattcctactgtaaatatatggtgtgctcacacgataaaccctaggaagccaattgatntcatagntcanaccatacctatgtatccaaatggttctttttttccggagtagtaagttacaatatgggagattattccgaagcctggtaggataagaatataaacttcagggtgaccgaaaaatcagaataggtnttggtatagaatggggtntcctccttcggcggggtc

SEQ ID NO: 966 - DNA, 342 bp, Homo sapien
  misc_feature (1)...(342): n = A,T,C or G
actatgttatgcacacattacaaataatataaggggaagttttattagcttagtaggaaattgttattattaaggtttaaaaatgagaacaggtgtgagttttccaaaatacttaaaaataatagtgtcaaaaattcaggggcagttaaggagtcatggatggaactagaggtcactatattaagtgacataagccanaaacagacaaacattgcatgttctcaattatttgcgggatctaaaagtcaaaacaattgaactcatggatatagagagtagaaggatggttactagtggctgggaaaaggggtgtgcgaggggaactggggatgcttaatgtgt

SEQ ID NO: 967 - DNA, 251 bp, Homo sapien
acatcttccagagctgttttcatctctgcctacaggggtaaagtccgcatggaattagagggggaaagtctgcactggaacctgctgtggccattttttttctgttgttgctgcttctctagtggagttactgcagcttagggatggttcctggaagtggacacattttacaaaaacgttttttaaatacacgccagctcttcgagaagcacttttttccttccgtcatgcttcatactatattgtattgt

SEQ ID NO: 968 - DNA, 413 bp, Homo sapien
  misc_feature (1)...(413): n = A,T,C or G
cctatgggtttatatcctcaaatacgacattctagtcaaagtcttggtaatataaccaatgttttcaaatgtattctgtcatacaaagagcagatttttattgaacttgtgcaataactatattaccatacaatataaatattcatgaatagtttcccaagtctggagcgaccacatagggagaaaatgtaaatgtctcaatttttgttcacaaaagtatattttatcaaattgctgtaagctgtggatagcttaaaagaaaaaaagtttcctgaaatctgggaaacaagacatttaaagaatcagcaaaatttcaaataaaaaattatgaaaatattatcctcattagtttcatttagtcccatgaaattaattattttctctgcttgatcttggtggacagnttcatgaag

SEQ ID NO: 969 - DNA, 341 bp, Homo sapien
  misc_feature (1)...(341): n = A,T,C or G
acccgtgggtcnnntacctatgggtttatatcctcaaatacgacattctagtcaaagtcttggtaatataaccaatgttttcaaatgtattctgtcatacaaagagcagatttttattgaacttgtgcaataactatattaccatacaatataaatattcatgaatagnttcccaagtctggagcgaccacatagggagaaaatgtaaatgtctcaatttttgttcacaaaagtatattttatcaaattgctgtaagctgtggatagcttaaaagaaaaaaagtttcctgaaatctgggaaacaagacatttaaagaatcagcaaaatttcaaataaaaaa

SEQ ID NO: 970 - DNA, 595 bp, Homo sapien
  misc_feature (1)...(595): n = A,T,C or G
actttcctagatgacnnntcgagtcaacatgaagccttagctaaaatgaatgattcaggatattaatgagaaattctcacaaatgatatgcatttaggaaatgattttgctttccttaaatagttcgaaggcttgaaaataaactttttttttgcatttcttttagaatgtttggtcattaacaacttttaaccttatcttcctcttctccttagcccttaacagaccgagtccattctatttggaaataacaagaacttgatcagattattaaatcttggaaacctcatttttaccttataaagtgttaagtttcacgtgcatattctcttacaaatgtagtataaatgttatggatagatataaggaaatattggcatagtataggtaattagtgaaaagacacaacttcacaaaacataataaaagataaacatgaaactataacactacttaaaaaatattttctcccaaaatttattttagcatttttgactagtttaataatatgaacactgccaaaaaatgggtttcaaagtcgcctggagaaacagttttcttcttctggagtccatctcagcagcagcgattttct

SEQ ID NO: 971 - DNA, 530 bp, Homo sapien
  misc_feature (1)...(530): n = A,T,C or G
actccagcttggacgacagggcaagactctgtctcaaaaaaaaaaacaaaaaaaaaaaaaacaaagcagaagcattcttaccactgagttttaagaaggaaaaaaaaaagcaggttaaaattacttcagaaaagagagtcataatgagataaacatatcactttaaacgtaggcgtaattgaagatgtcttttagagatagattaatattgttttacttaggttaaatagaacaccattgaaagcttaatgtcacagattcacatttatgtaaatccttaacctctaaagtttttagaagcctaaattaaacatgattgattatcatctaaagctaatgttatttctgtctcctaacgtcagtaatatgaattgtaatgtgaattgttgaactttgatagtattttttaagtttaaaaatgtttttcttattagagtagtatagtattacatatttatggtngaatacagaaaagaanngagtgaaaatcatcccttgaatcacctaaatcctaaaataatgactaccta

SEQ ID NO: 972 - DNA, 546 bp, Homo sapien
  misc_feature (1)...(546): n = A,T,C or G
acttcagttggtgcacaaantactgtcatttgctcaaagctggctgccaaatgtttggtgatgaaggcagaaatgaatggctcaaaacttgggagaagagcaaaacctgaaggggccctccagaacaatgatgggctttatgatcctgactgcgatgagagcgggctctttaaggccaagcagtgcaacggcacctccatgtgctggtgtgtgaacactgctggggtcagaagaacagacaaggacactgaaataacctgctctgagcgagtgagaacctactggatcatcattgaactaaaacacaaagcaagagaaaaaccttatgatagtaaaagtttgcggactgcacttcagaaggagatcacaacgcgttatcaactggatccaaaatttatcacgagtattttgtatgagaataatgttatcactattgatctggttcaaaattcttctnaaaaaactcagaatgatgtggacatagctgatgtggcttattattttgaaaaagatgttaaaggtgaatccttgtttcattctaagaaa

SEQ ID NO: 973 - DNA, 284 bp, Homo sapien
  misc_feature (1)...(284): n = A,T,C or G
accttgtaatgaagaggcngctgatgccatgcacttgtctgagggcatagctccatgtcttctgacattcctggtgtcccaaagaatagcaaaaagccagtttgaatattatgtaacttatttttttaatgtggacaggggaccttgaaaatcactaagttattaaaaatgtggatgtgctagaattggatatgtccaggaacatgggaagggctcactattggaatcccatgagtttccattttgtctctacccaaacgtattccaaagctgactgcatttgt

SEQ ID NO: 974 - DNA, 489 bp, Homo sapien
  misc_feature (1)...(489): n = A,T,C or G
tgtagcaagagaaaaaccttatgatagtaaaagtttgcggactgcacttcagaaggagatcacaacgcgttatcaactggatccaaaatttatcacgagtattttgtatgagaataatgttatcactattgatctggttcaaaattcttctcaaaaaactcagaatgatgtggacatagctgatgtggcttattattttgaaaaagatgttaaaggtgaatccttgtttcattctaagaaaatggacctgacagtaaatggggaacaactggatctggatcctggncaaactttaatttattatgttgatgaaaaagcacctgaattctcaatgcagggtctaaaagctggtgtttattgctgttattgtggttgtggtgatagcagttgttgctggaattgttgtgctggttatttccagaaagaagagaatggcaaagtatgagaaggctgnnataaaggagatggttgagatgcatagggaactca

SEQ ID NO: 975 - DNA, 209 bp, Homo sapien
actgtcttctttagatagagacgctataaaatttggctatcagtgagtaaatattagaatggccaagtttgccacttaattcatcccagaagaggaaaaataatagaagttgattaaatattttaaaatttaaaaatttttaaaaatttgagtatcaatacattattgcttataaatttcatgacattttcatatataaagtaaaaaat

SEQ ID NO: 976 - DNA, 332 bp, Homo sapien
actatattcaagccactttcatatattaactagataaaaggataccatactgctatttgaaattcaatcacaaagcaaaaatgtcataattttaatgtattttaagggaagacggggttcttaacatgaatatgtaatacaaaaacaattctaaataataatatttaatagaagaaaaaatctgtataattatttagaagtaactctgtttttaaaatttcaatgttaggaagaaaatcccttaaatttgaaatagcggaatattctctcatatgaaaaaactgtgtcccagtgttattcttcaacttagaaattaggcaaagtattttagt

SEQ ID NO: 977 - DNA, 372 bp, Homo sapien
  misc_feature (1)...(372): n = A,T,C or G
cccatttcaggaatnnaaaattaagtagaacaaaaaaacccagcgcacctgttagagtcgtcactctctattgtcatggggatcaattttcattaaacttgaagcagtcgnggctttggcagtgttttggttcagacacctgttcacagaaaaagcatgatgggaaaatatttcctgacttgagtgttcctttttaaatgtgaatttttatttctttttaattattttaaaatatttaaacctttttcttgatcttaaagatcgtgtagattggggttggggagggatgaagggcgagtgaatctaaggataatgaaataatcagtgactgaaaccattttcccatcatcctttgttctgagcattcgctgt

SEQ ID NO: 978 - DNA, 280 bp, Homo sapien
ttttttttgactctacagggggtgctatagggtaaatacgggccctatttcaaagatttttaggggaattaattctaggacgatgggcatgaaactgtggtttgctccacagatttcagagcattgaccgtagtatacccccggtcgtgtagcggtgaaagtggtttggtttagacgtccgggaattgcatctgtttttaagcctaatgtggggacagctcatgagtgcaagacgtcttgtgatgtaattattatacgaatgggggcttcaatcgggagt

SEQ ID NO: 979 - DNA, 399 bp, Homo sapien
  misc_feature (1)...(399): n = A,T,C or G
accttatnngtttccccttccttgtcagcgtcgggaagatggtatgaagtcctctttggggcagggactctagtagatcttcttgtcagagaagctgcatggtttctgcagagcacagttagctagaaaggtgatagcattaaatgttcatctagagttaatagtgggaggagtaaaggtagccttgaggccagagcaggtagcaaggcattgttggaaagaggggaccagggtggctggggaagaggccgatgcataaagtcagcctgttcaaagtgctcnnggacttancaaaatganaagatgtgacctgtnccaaaaactatttttgagaatttnttaaatgtgacncatnttttctggtttatgaataaacttacagcaacaaataatcaaaga

SEQ ID NO: 980 - DNA, 298 bp, Homo sapien
  misc_feature (1)...(298): n = A,T,C or G
gaacccgtggtcctccgcttcatgattttctgncgnctnttggcaaaaatggcaaataatgatgctgttctgaagagactggagcanaagggtgcagaggcagatcaaatcattgaatatcttaagcagcaagtttctctacttaaggagaaagcaattttgcaggcaactttgagggaagagaagaaacttcgagttgaaaatgctaaactgaanaaagaaattgaagaactgaaacaagagctaatnnaggcagaaattcaaaatggagtgaagcaaataccattttccatctggt

SEQ ID NO: 981 - DNA, 143 bp, Homo sapien
  misc_feature (1)...(143): n = A,T,C or G
acttttcctggactttgcctggacttttttctcccaaattagtatattctagtcatgcctaactatgctattctttgtctagatgaacangagaactgggcaacccatgatccacatctacctggacanggaaacaggaaagc

SEQ ID NO: 982 - DNA, 413 bp, Homo sapien
  misc_feature (1)...(413): n = A,T,C or G
actgaggaaatattttgtaaagtgagctttgggtataacttagccccatcattatttagagaatagaggaggaagaaagaggaaggattttaaaggcagacaatgacagaccattcaggataggtagggttttaaagggagataaacacagtctcatcaactaaggagagatttgctgcnntaaataggatgagggaaatagtctgtgggatgcaagcaaaggaagcagggtgccttagacactgagtggagccagaaagatcatgcggcctttttccaagtncatggccaccaagtaagaatggttggttgacaagacaggaggctaaaacaggaaggtaatcttgtgcacctgacaaatagaaagaataaaggatcaaaattgaaggcaggctataagagtatcaagaaat

SEQ ID NO: 983 - DNA, 484 bp, Homo sapien
  misc_feature (1)...(484): n = A,T,C or G
acaaggtgcaaatnggaattccgattttagggcaacttttcagaggttgacagttaagtatttggggcatgcacaaatgtgatagttattttgctggaggtgacaggtatctcttaaatatcaacaatgccttttagttttcagtatgagatatagaaacagtctataatggagtaacattttaatgtctcaccattagagaanttggaaattaacatacatatgagactcctgcgttttagttaattggagaataagaatggctaatgtttctttgaggaccagncagtgattaccctatcactgagattgaataaattgtttnaaacatctttatttttgttgtattaaaattttaggtntaaattnatatatgcnatgattagatattgaaggttgtgaaatgtgaatgaaaacgtgtnaagtgaggcttcacaannaatnttattctctgtgtntcaaaagtatttgtcctattttaaaa

SEQ ID NO: 984 - DNA, 279 bp, Homo sapien
  misc_feature (1)...(279): n = A,T,C or G
acattcactangggcaaatgggtttttctaaataaatgacataaaaaagaactggttgtctttctttaaagaaagtcttagttacaggattctgtgattaaaatccttaaatattgggttgccttctgcagctgtagtatcagtttttgaaccacagtnntgggaagaaagacaaatggattcccttagaagtaagatttctatttgcaggatgagttgggcatnggaaagggtcanggttcatcangtgaactcaacactgggatgagactagaactt

SEQ ID NO: 985 - DNA, 453 bp, Homo sapien
  misc_feature (1)...(453): n = A,T,C or G
accggtttttgtatataaaattcatgtttccaatctctctctccctgatcggtgacagtcactagcttatcttgaacagatatttaattttgctaacactcagctctgccctccccgatcccctggctccccagcacacattcctttgaaataaggtttcaatatacatctacatactatatatatatttggcaacttgtatttgtgtgtatatatatatatatatgtttatgtatatatgtgattctgataaaatagacattgctattctgttttttatatgtaaaaacaaaacaaganaaaatagagaattctacatactaaatctctctccttttttaattttaatatttgttatcatttatttattggtgctactgtttatccgtaataattgtggggaaaagatattaacatcacgtctttgtctctagtgcagtttttcgagatatt

SEQ ID NO: 986 - DNA, 475 bp, Homo sapien
  misc_feature (1)...(475): n = A,T,C or G
acctttttttaaggagtgtaaactatgatatatgatttaagtaatcacttatttgaatgcaatattgattcagataggcataatctattcatttttcataatgaaatgtatattcctatttcaacactttatgcagattttacttatttcttacagggctgctgtgtggattcaatggcttatctatgtaagtgtccagcacagtatctggcacatagtaagcttttagtgtatgctacttatttatattaagtgagtcaatctgtcacttataatagaaaaactatctaatgcctcaggagaataatcaaaagataaacctacagatgtgtgacttctgttaaagtattatgcatccactatttcccaaattactaaactaattgttttaaaatgttacaatctatttttaagatcatatttgttctctatgtttttgctatggcctttggcctaaaccaatacaatnctgaca

SEQ ID NO: 987 - DNA, 444 bp, Homo sapien
  misc_feature (1)...(444): n = A,T,C or G
acaaaaaagaactacttgtattctagaagaaatatgaaatgcttaatttataagcgggctggagattttttccaatattgttttctttgaaaatgaaaggggatcatctattttagttttggggtctgggaactttttgaaaatttaatttgtggaccaatgttttgtgaaagctaaagagggcaggggttaaaatagggcttgaatttctcattctgtatagaccagcaaacttccctgtgcaaggcaagtttacatcacaaatccaagaatgtttgcatcctaaatgctagtttgcttcagcccctagttaacctcaggacttggtttgcatataaaaggtagacagctgatatgttttcatgaataaatattgttcagccagaaaaggttggtgtcaggtaatgcatatttttttaagctttgntttatatttatttttca

SEQ ID NO: 988 - DNA, 464 bp, Homo sapien
  misc_feature (1)...(464): n = A,T,C or G
accaattctctcttantttctttttttatagttggtttattttgcaattataaatgttaaacatccctagagatgaaagttaaaatggttgatcacagatcagtagcaaaatacaaattgacaattcaaaattataaataaaactctgttgaggatgtttaactttgagtctccaaatttaagagctaagcttggaagaaacaaatttataggttatatttccctcttaaattaaaaaacaaacttcctctggcagtagtttgtgaattcctttcattgtaatgataccatgattacaggatcaaaaatgcttaacttacttgccattctgctcacatcatcacagttgttttttttttttttaagcactcaatgtaggcattttaatcttctggataacagagtatcttttgagaaattaaaatcgaattgaccatttgcaatatttggttttcctaataggt

SEQ ID NO: 989 - DNA, 388 bp, Homo sapien
acacaagattaacactacttatgaaatatggacaaatatattactactcattataacccatccagattattagtttaactcattcaattactacaaagatccttacagagctgaatttaatatacaatagaacatcactgccctctgatggtatcactaatatataattttaaattcagcaaacaaaaaatcctttatcataaagtaaaacagggtatgttaattttataagctacataaataaaaataaattggaaaaaattttacatctgcctaagaatactcattactaagttataaaaatttacagtgctccttcacatcagcccttcaaatgattttttcaagattctccctgatgatcagtttaaaggcactatgaagatgt

SEQ ID NO: 990 - DNA, 343 bp, Homo sapien
gaccagaagcctgcatttctgcattctgcttaattccctttccttagatttgaaagaagccaacactaaaccacaaatatacaacaaggccattttctcaaacgagagtcagcctttaacgaaatgaccatggttgacacagagatgccattctggcccaccaactttgggatcagctccgtggatctctccgtaatggaagaccactcccactcctttgatatcaagcccttcactactgttgacttctccagcatttctactccacattacgaagacattccattcacaagaacagatccagtggttgcagattacaagtatgacctgaaacttcaagagt

SEQ ID NO: 991 - DNA, 466 bp, Homo sapien
actaaacccccgctgaccaaggatcgaggagtagctgccagtgcgggaagtagcggagagaacaagaaagccaaacccgttccctgggtggaaaaatatcgcccaaaatgtgtggatgaagttgctttccaggaagaagtggttgcagtgctgaaaaaatctttagaaggagcagatcttcctaatctcttgttttacggaccacctggaactggaaaaacatccactattttggcagcagctagagaactctttgggcctgaacttttccgattaagagttcttgagttaaatgcatctgatgaacgtggaatacaagtagttcgagagaaagtgaaaaattttgctcaattaaccgtgtcaggaagtcgctcagatgggaagccgtgtccgccttttaagattgtgattctggatgaagcagattctatgacctcagctgctcaggcagctttaagacgtacct

SEQ ID NO: 992 - DNA, 422 bp, Homo sapien
actacataacacattactatactactacaaaatatccttctctataaatgcactgaatattttcttgggcattttattaggccttttttagcattattacaaatgctaacaacaagatacttcaaaccaccaaatataaagtcagcttcttaattttctgaaatttagttatttgagttaataagaattctgtaggaatactgacccatctcttttcatccaaccttcaaaatagttaagcctatttgcccatctcacctaaccttcaaaatagttaaaacaaaaacaaacccaaactagctatatataacaagaatctttcaattcccaaactattgaaagaccctaagtcagccaatctatgaaattatacaagatgaaggtgaaaaagctgtgctttttttttaaaccattaaacccag

SEQ ID NO: 993 - DNA, 475 bp, Homo sapien
  misc_feature (1)...(475): n = A,T,C or G
acctgtgggttnatnacctatgggtttatatcctcaaatacgacattctagtcaagtcttggtaatataaccaatgttttcaaatgtattctgtcatacaaagagcagatttttattgaacttgtgcaataactatattaccatacaatataaatattcatgaatagtttcccaagtctggagcgaccacatagggagaaaatgtaaatgtctcaatttttgttcacaaaagtatattnttatcaaattgctgtaagctgtggatagccttaaaagaaaaaaagtttnctgaaatctgggaaacaagacatttaaagaatcaggcaaaatttcaaataaaaaatttatgaaaatattatcctcattagttccatttagtcccatgaaattaattattttctctgcttgatcttggtggacagtttcatgaanctgtcannttagttcattaaaagttttggaaatntctcagaca

SEQ ID NO: 994 - DNA, 362 bp, Homo sapien
tcgagcggccgccggcgggtacaacaaaaaagggcattggcccagtttattcgtccaaagctgctcggagtggactcaggatgtgcgaccttgtttctgactttgatggcttctctgagaggtttaaagttctagctaaccaatacaaatctatataccccactttggaaatagacattgaaggtgaattacaaaaactcaagggttatatggaaaagattaaactaatggtgagagatggagtttattttctatatgaggccctacatggaccaccaaagaaaatcttggtagaaggtgcaaatgcagcactattagatattgattttgggacttacccttttgtaacctcttcaaattgt

SEQ ID NO: 995 - DNA, 370 bp, Homo sapien
  misc_feature (1)...(370): n = A,T,C or G
acttatttcaacaattcntanagatgctagctagtgttgaagctaaaaatagctttatttatgctgaattgtgatttttttatgccaaattttttttagttctaatcattgatgatagcttggaaataaataattatgccatggcatttgacagttcattattcctataagaattaaattgagtttanagagaatggtggtgttgagctgattattaacagttactgaaatcaaatatttatttgttacattattccatttgtattttaggtttccttttacatttcttttttattatgcattctgacattacatatttttttaagactatggaaaaataatttaaagatttaagcctctggtggatgat

SEQ ID NO: 996 - DNA, 172 bp, Homo sapien
gggtttatcacctatgggtttatatcctcaaatacgacattctagtcaaagtcttggtaatataaccaatgttttcaaatgtattctgtcatacaaagagcagatttttattgaacttgtgcaataactatattaccatacaatataaatattcatgaatagtttcccaagt

SEQ ID NO: 997 - DNA, 257 bp, Homo sapien
  misc_feature (1)...(257): n = A,T,C or G
tttccctgcntagtagaacaaaacagccctgtgcctttgctagagaaccgacantcaaacccttttctgtggaggatcaaggctgcctcattggagtgcccattgcccacctttgactgtattgttctcaaattaaccagatgaatgtcacaaggcaaagatgactgtaatggagagaattcaccttgcagctcangggtangtgaggannaacttatttgccattggaatgactggatgattcatgagtagaagaa

SEQ ID NO: 998 - DNA, 183 bp, Homo sapien
acgcatcatgtggtctcagcgtgatccatcacttcgcaaaagtggagtaggcaacatattcattaaaaatctggacaaatccattgataataaagcactgtatgatacattttctgcttttggtaacatcctttcatgtaaggtggtttgtgatgaaaatggttccaagggctatggatttgt

SEQ ID NO: 999 - DNA, 369 bp, Homo sapien
  misc_feature (1)...(369): n = A,T,C or G
acttctggaaaaaaatgcaaatggtttagccaggatctttcctgtctgattcgtcactattattatatctgatgatgcgaatggttggagcgattcaatcctaagtcattaatgagctattttataaacaccactgtctgaagatcttcatttacattttgctaaggatcacttcgctaacctcacaggcttgtgtcaacagcatgatttgcaggacttcagttacactcttataaacaacacggctgtattgttaatcggttaatattttatnaagtgtaaatattttattatgttttgaagggaactattgattctaaattattaaacccctgagaaggactatttaaatgaaatatacaattaagt

SEQ ID NO: 1000 - DNA, 349 bp, Homo sapien
  misc_feature (1)...(349): n = A,T,C or G
acaagctttttttttttttttttttttttttttgggattttaaaaatatttattacatttgtttctagaaatcatagaaaataaaaattgatacaattttgatatacaactttanaaaggcatatttatcctttcacaccananaagtttatgcaatgccagacatggaaataccaaagccactggtgacaaagggtaaacgctactgatanaanaaagccttgtccatttttatagttttcttctctaccattatttatttttgagcaaataccagtccagtggaaagagttctgaacataaaaggcacctagagtaaaaattanaccttaactaataaaacagctgt

SEQ ID NO: 1001 - DNA, 482 bp, Homo sapien
  misc_feature (1)...(482): n = A,T,C or G
acatctgtgtgccncgctggggcagactgtgccaatgctcaccaaacactagaatctgctcttacacctctagcatgtatctcgttgtagcagagttgtgcactttctcagcattgtgtagtgttttctaattgcatctaaaaacttatcaaaagtgattgtgaaaacagtgtcttagaagtataaacagaaatggcaatatttatgtcctgtgattcaagcccaaaggttataaattcaactttcacagggaatagcactgctaatcttactttatgatttaaatataaaggaaaatcacagcagccttaatttcctgttggtcggatcatttgcagcagttctagttcctgacttttaaaatggatgaaattttctctttgtctgattttggaaaaggaactgcttttttgccttactgctttggtataaggatgaaaaacatgagcactctgnagacaaaatgaccttaaatcacattg

SEQ ID NO: 1002 - DNA, 507 bp, Homo sapien
  misc_feature (1)...(507): n = A,T,C or G
gggggcccaagtccttctgatcgaggcccagcccctacccccaacagagagcctgccaatggcaccaacccctctgctgagctgcaccgtagtcctagcctcctataaggcccaggaagagggcagaggggccagaaggactccatggcccaaagaccctcctccctgcaggcactgtgggaacagacacagagatggagaagcagggacatgctgagaggacgaagccaaggaaattagggaggagagtcaaagggatcaaggagagttggggatttgagctgcagcagagagggatgagggatttagccctctgccctaaggtgccattgaaaagggacaggacccttcggaggtgcctgtgaggagaggggagcaggacctctccctcctccagatccctgcctcctagtgccagcccctcacacgccttcatcctgaaacangaagaggacggcaccaagtttgggggtgctggatgaaagagacgangggtgatctgtgagt

SEQ ID NO: 1003 - DNA, 213 bp, Homo sapien
  misc_feature (1)...(213): n = A,T,C or G
ctatttcatgtnnttgatcaaaaactatttgggatatgtatgggtagggtaaatcagtaagaggtgttatttggaaccttgttttggacagtttaccagttgccttttatcccaaagttgttgtaacctgctgtgatacgatgcttcaagagaaaatgcggttataaaaaatggttcagaattaaacttttaattcattcaagaaaaaaaaaa

SEQ ID NO: 1004 - DNA, 186 bp, Homo sapien
  misc_feature (1)...(186): n = A,T,C or G
atgagtttgctaatacaatgccagtcaggccacctacggtgaaaagaaagatgaatcctagggctcagagcactgcancagatcatttcatattgcttccgtggagtgtggcgagtcnnctaaatactttgacgccggtggggatagcgatgattatggtagcggaggtgaaatatgctcgtgtgt

SEQ ID NO: 1005 - DNA, 221 bp, Homo sapien
  misc_feature (1)...(221): n = A,T,C or G
tccaggagaccgtgcctgttccccacacacatgcgcccgatgatgcggcagccggcgatagacgcgtgcaccacggggatggtatcggagagctcgccctcgaacacactgtanaagttctctgagcctccgatcgctaccagacagtaggtgttggtgagcttggcaaagcagccgatctcacagttgttctcgaacgaagctcggaccgccatgaggcc

SEQ ID NO: 1006 - DNA, 482 bp, Homo sapien
  misc_feature (1)...(482): n = A,T,C or G
actttggcttttntttctttttttttgcacagaataataaatgaatccatgtagaaatgacctggaacaaaacatcttggtccattttgcctattgatttagtgataactatacatataattttatcttgctccatggcatttttataacataacatcattcaacataaatgtcctgttactattgacgtcacacaataaacacattaacagttctatcaatatcctcattcttctaaactgcattttaaagttgaaaacacctttttttaaaaaaagtaaatatatttcatttaaaaatttaatctcaattcaaattttttcagatatattctcagtaaaaatatactttggatcagattgactatttaaatgaattttatatatatatataaacacacacattaacagtttaaaaggtaaatgtntttttgcaaaagaagagaaattanggagtgctctgaaattcagtgtantgatgca

SEQ ID NO: 1007 - DNA, 468 bp, Homo sapien
  misc_feature (1)...(468): n = A,T,C or G
acctgcaaattcttaanaatacctttaccaccagattagaacagtaagcataataaccaatttcttaataagtaatgtcttacaaataaaaacacataaaaaatagctttaaatgcattcttcacaagtaattcagcatatatttttatatcatgtttacttatgcttaagaattaaagcaagtatatttattactctgatggaaatatgggaaatctctcattcatgcaatatacagggataatattcaagcgaagggaaaattcccgctttttatttttgttaaatgtatccatatataatcatcgacatgacagatgaggaaacccatgaagtttcccactagtcagatatacattttcacttcatcagaagcacctgatatctacagctaatttataattagatactgtttcaatgaaaccaaaatgagccctacaagttcctataaacaaaagcttccaatgt

SEQ ID NO: 1008 - DNA, 534 bp, Homo sapien
  misc_feature (1)...(534): n = A,T,C or G
acttggagggagcctcanccctgtgcttaagacttacagctgattggatcgggccttctgggattacccaggataatctcccctaaagttacctgatgagggtctttaatttcatctgcaaaatggttccacatcactacccaaattgtgtttgaataacttgaagatttgacacaagggaaaagcagccatggctgatgaagtgccacaggcctataaccccagctactgggaggccgaggcaggaggatggcttgagcccaggagttaaagtgtagcctgggcaacatagtgaggcctcatctcaaaaaaatgagaagggccatagtgtggctatgttagctgtttcaggggacactagcacgtgtgtggcaaaaataaacctttaatgtcagcagctacgtgtgtggctagtggctgctctgttggacagcagaactctagggggttagccaatgtgaaaaggacgaatgcccagccgatgccagcangagtgagggatgtgggaggacaaagactttcctgcttccaagt

SEQ ID NO: 1009 - DNA, 451 bp, Homo sapien
actcaaggtttaaccttaaaattaagatttccttaaccttaaccttaaaattgatattatattaaacatacataatacaatgtaactccactgttctcctgaatattttttgctctaatctctctgccgaaagtcaaagtgatgggagaattggtatactggtatgactacgtcttaagtcagatttttatttatgagtctttgagactaaattcaatcaccaccaggtatcaaatcaacttttatgcagcaaatatatgattctagtgtctgacttttgttaaattcagtaatgcagtttttaaaaacctgtatctgacccactttgtaatttttgctccaatatccattctgtagacttttgaaaaaaaagtttttaatttgatgcccaatatattctgaccgttaaaaaattcttgttcatatgggagaagggggagtaatgacttgt

SEQ ID NO: 1010 - DNA, 394 bp, Homo sapien
accattggtggccaattgatttgatggtaagggagggatcgttgacctcgtctgttatgtaaaggatgcgtagggatgggagggcgatgaggactaggatgatggcgggcaggatagttcagacggtttctatttcctgagcgtctgagatgttagtattagttagttttgttgtgagtgttaggaaaagggcatacaggactaggaagcagataaggaaaatgattatgagggcgtgatcatgaaaggtgataagctcttctatgataggggaagtagcgtcttgaccatgaggggaacaagaaactacttctaacgggaagaagaaacactacggtcgattaaaaaaattattttgttacttcgaagtatgtcctatatggggaaaaaacgt

SEQ ID NO: 1011 - DNA, 175 bp, Homo sapien
acttcacttaaagagaaagagcacaataaagaaccagattcaagtgtgagcaaagaagtagatgacaaggatgcaccaaggactgaggaaaacaaaatacagcacaatgggaattgtcagctgaatgaagaaaacctctctaccaaaacagaagcagtataggaccgacaagtgt

SEQ ID NO: 1012 - DNA, 629 bp, Homo sapien
  misc_feature (1)...(629): n = A,T,C or G
acttggctcctttgagctacccttattttaagaattataaataggtgtcaacccacacaaagaacagattgtggattaccgtagggaaaaaaatagcttactcaacttactaaaagtttcaacaccaaaaaagatttaacttggctgaaagttctgaaacagctgagacacagaaccaggaagctataatttataatgaaatgttgatacatacttaaaagctactgcagctgtagctatactaaaataagatttcttcagggtttacttaccctgaaatgcaagaatacaagcataacaataatattactgtttttatatgcaccaatacctctctttaatatataaagctctacaacaaatacctctaataattttacaattaaattaagtccatacttctatactactttggtctcaacatttttaaaacatcaattaattttgaaaatttacaatttaacaacatgatcctatcaataacaagcacattttgtagtggattaaagacacattcaaccatgcaatccagtgttcaataccttaatgataaataacaatgctgattgacttttattttgaaaaatcatngaaaactggaataatcatctgagactcacagtgatcac

SEQ ID NO: 1013 - DNA, 552 bp, Homo sapien
  misc_feature (1)...(552): n = A,T,C or G
actatgaacaccagaacagaagagattttttactattatgacacaaacacagggaaagagggcaaactagacattgtaatgcataagatgcaggaaaaagtgcagagcattaactataacccttttgaccagaaactttatgtctataacgatggttaccttctgaattatgatctttctgtcttgcagaagccccagtaagctgtttaggagttagggtgaaagagaaaatgtttgttgaaaaaatagtcttctccacttacttagatatctgcaggggtgtctaaaagtgtgttcattttgcagcaatgtttaggtgcatagttctaccacactagagatctaggacatttgtcttgatttggtgagttctcttgggaatcatctgcctcttcaggcgcattttgcaataaagtctgtctagggtgggattgtcagaggtctaggggcactgtgggcccagtgaagcctactgtgaggaggcttcactagaagccttaaattaggaattaangaacttaaaantcagtatggcgtctagggattctttgt

SEQ ID NO: 1014 - DNA, 162 bp, Homo sapien
acttgaagaggcggaaggcagccagccagcaggtgcggctctgctcatcttcactgcagaagatccgaagccccttgtggccatttcgaagcttgttgggcttgacacagaaaccgaagtcagtgggcatcccgtagagcttgcggccctgcgtcaccacgt

SEQ ID NO: 1015 - DNA, 601 bp, Homo sapien
  misc_feature (1)...(601): n = A,T,C or G
acagacagggtttcaccgtgttagccaggatggtctccatctcctaacctcgtgatccgcccgcctcancctcccaaagtgctgggactacaggcgtgagccaccgcgtccagccagctttgactatttttatactcctcacaattctcaagcacttcttaggcagagcacanaaacanaaacaannaaaaaaacttagaaatatatgaatgcaagagatgggaagaggaaagaccatttcccaactagctcagagtagcctgatcgtaactccaaacagttcacaaaattctcttaggctgaaaccattcatctttcctaaacgtccctcatgtctgctaaaatcactttcccaaatgccttgtatctaggaatctgatgcctactgagcttaccttttatcaaattaatagtgactcaatctccattactggaaagcaggcactttaaccttgtagctctaaaacagaaatagtttttaactgatttcagttggaaaacccagcaattttaacaaaaagggggaggggcagnccaaatagcatttggaaaatgttaaaattttattattttacattctttaaccattatagttactgca

SEQ ID NO: 1016 - DNA, 273 bp, Homo sapien
cccgagcgccgctccggctgcaccgcgctcgctccgagtttcaggctcgtgctaagctagcgccgtcgtcgtctcccttcagtcgccatcatgattatctaccgggacctcatcagccacgatgagatgttctccgacatctacaagatccgggagatcgcggacgggttgtgcctggaggtggaggggaagatggtcagtaggacagaaggtaacattgatgactcgctcattggtggaaatgcctccgctgaaggccccgagggcgaaggt

SEQ ID NO: 1017 - DNA, 305 bp, Homo sapien
  misc_feature (1)...(305): n = A,T,C or G
actggctcctcatctcactcgggcttatgccaaagatgtaaaatttggtgcagatgcccgagccttaatgcttcanngtgtanaccttttnnccgatgctgtggccgttacaatggggccaaagggaagaacagtgattattgagcagagttggggaagtcccaaagtaacaaaanatggtgtgactgttgcaaagtcaattgacttaaaagataaatncaaaaacatttggagctaaacttgttcaagatgttngccaataacacaaatgaagaagctggggatggcactaccactgctactgt

SEQ ID NO: 1018 - DNA, 156 bp, Homo sapien
acaacggccagccaattaccaaaatggcctgtggggctgaattcagtatgataatggactgcaaaggaaacctctattcctttgggtgccctgaatatggtcagctgggacacaactcagatgggaagttcatcgcccgggcacagcggatagagt

SEQ ID NO: 1019 - DNA, 520 bp, Homo sapien
actcatgcccgactgtctaccaggcacacagactttgaggagagggcgtatgtcgtcttgatccgcatcaatgatgggggtcggccacccttggaaggcattgtttctttaccagttacattctgcagttgtgtggaaggaagttgtttccggccagcaggtcaccagactgggatacccactgtgggcatggcagttggtatactgctgaccacccttctggtgattggtataattttagcagttgtgtttatccgcataaagaaggataaaggcaaagataatgttgaaagtgctcaagcatctgaagtcaaacctctgagaagctgaatttgaaaaggaatgtttgaatttatatagcaagtgctatttcagcaacaaccatctcatcctattacttttcatctaacgtgcattataattttttaaacagatattccctcttgtcctttaatatttgctaaatatttcttttttgaggtggagtcttgctctgtcgcccaggctggagtacctcggc

SEQ ID NO: 1020 - DNA, 195 bp, Homo sapien
acgcccttttcctaacactcacaacaaaactaactaatactaacatctcagacgctcaggaaatagaaaccgtctgaactatcctgcccgccatcatcctagtcctcatcgccctcccatccctacgcatcctttacataacagacgaggtcaacgatccctcccttaccatcaaatcaattggccaccaatggt

SEQ ID NO: 1021 - DNA, 514 bp, Homo sapien
  misc_feature (1)...(514): n = A,T,C or G
ttttttttttttttctgaaaaagtcatggaggccatggggttggcttgaaaccagctttggggggttcgattccttccttttttgtctanattttatgtatacgggttcttcgaatgtgtggtagggtggggggcatccatatagtcactccaggtttatggagggttcttctactattaggacttttcgcttcgaagcgaaggcttctcaaatcatgaaaattattaatattactgctgttagagaaatgaatgagcctacagatgataggatgtttcatgtggtgtatgcatcggggtagtccgagtaacgtcggggcattccggataggccgagaaagtgttgtgggaagaaagttagatttacgccgatgaatatgatagtgaaatggattttggcgtaggtttggtctanggtgtancctgagaataggggaaatcantgaatgaagcctcctatgatggcaaatacagctcctattgataggacatantggaagtgagctacaacgta

SEQ ID NO: 1022 - DNA, 556 bp, Homo sapien
  misc_feature (1)...(556): n = A,T,C or G
acagtgggagaaatcacanatgccctgaaaaaggtatttggtgaacataaagcgaatgatcgaatggtgagtggagcatatcgccaggaatttggagaaagtaaagagataacatctgctatcaagagggttcataaattcatggaacgtgaaggtcgcagacctcgtcttcttgtagcaaaaatgggacaagatggccatgacagaggagcaaaagttattgctacaggatttgctgatcttggttttgatgtggacataggccctcttttccagactcctcgtgaagtggcccagcaggctgtggatgcggatgtgcatgctgtgggcgtaagcaccctcgctgctggtcataaaaccctagttcctgaactcatcaaagaacttaactcccttggacggccagatattcttgtcatgtgtggaggggtgataccacctcangattatgaatttctgtttgaagttggtgtttccaatgtatttggtcctgggactcgaattccaaaggctgccgttcangtgcttgatgatattgagaagtgtttggaaaaga

SEQ ID NO: 1023 - DNA, 376 bp, Homo sapien
acatatatcccgatgtgtctgtgtgaatctttgtcttttttgggggagggcagagggcggttctttttttagatattgttcctaaaaaggaataaatgcatacacctgtttgtcaaaacacctttgctttttgtgcaactgctttatattaacgatactaaaaaaaatagctttggaaaaaaaactactgtatgtaacggaattgcagaatatgctgcacatgtattttatttagttatccttgctttaagaatattggatgacatttcctgacatgtgggagggagaaactccctaacttttttttttctgcttttaaactgtaacatagttgaagattttcttttttctgttctcattgattggagcattttgt

SEQ ID NO: 1024 - DNA, 185 bp, Homo sapien
  misc_feature (1)...(185): n = A,T,C or G
acctgtgggtnnatcacctatgggtttatatcctcaaatacgacattctagtcaaagtcttggtaatataaccaatgttttcaaatgtattctgtcatacaaagagcanatttttattgaacttgtgcaataactatattaccatacaatataaatattcatgaatagtttcccaagttctggag

SEQ ID NO: 1025 - DNA, 173 bp, Homo sapien
  misc_feature (1)...(173): n = A,T,C or G
ttttttttggctctngagggggtgctatagggtaaatacgggccctatttcaaagatttttaggggaattaattctaggacgatgggcatgaaactgtggtttgctccacagatttcagagcattgactgtagtatacccccggtcgtgtagcggtgaaagtggtttggttta

SEQ ID NO: 1026 - DNA, 494 bp, Homo sapien
actgagcaggattaccatggcaacaacacatcatcagtagggtaaaactaacctgtctcacgacggtctaaccccagctcacgttccctattagtgggtgaacaatccaacgcttggtgaattctgcttcacaatgataggaagagccgacatcgaaggatcaaaaagcgacgtcgctatgaacgcttggccgccacaagccagttatccctgtggtaacttttctgacacctcctgcttaaaacccaaaaggtcagaaggatcgtgaggccccgctttcacggtctgtattcgtactgcggcgggtaggcctaggactgtgggggcaatgaatgaagcgaacagattttcgttcattttggttctcagggtttgttataattttttatttttatgggctttggtgagggaggtaagtggtagcttgtgtttaatatttttagttgggtgatgagaaatagtgtaaggagtatgggggtaattatggtgggcca

SEQ ID NO: 1027 - DNA, 251 bp, Homo sapien
  misc_feature (1)...(251): n = A,T,C or G
caagtttgaatttcagagaaacaatttcacgttaagaatgtttcatgcaatatttggcatatatttacagtaaaagcattcattatttgtctgaaattcaaatttaactgagcatgctggtttttctcattgtttggtttttctaaatctggcaatcctacanntgtggtcatgggaaatcacctacagcatgttaaagtcctctagttcatcatctcgtcacctgaaatggaagtcctttttccctcacc

SEQ ID NO: 1028 - DNA, 496 bp, Homo sapien
  misc_feature (1)...(496): n = A,T,C or G
accctcttcaagaatcnnatggatgtcgttttgaagggcggcaatcttcctcagtatagaggggtgaacattcggagattgctcaacggtagcatcgtggtcaagaacgatgtcatcctggaggcagactacactttagagtatgaggaactgtttgaaaacctggcagagattgtaaaggccaagattatgaatgaaactagaacaactcttcttgatcctgattcctgcagaaaggccatactgtgctatagtgaagaggacactttcgtggattcatcggtgactccgggctttgacttccaggancaatgcacccagaaggctgccgaaggatatacccagttctactatgtggatgtcttggatgggaagctggcctgtgtgaacaagtgcaccaaaggaacgaagtcgcaaatgaactgtaacctgggcacatgtcanctgcaacgcannggcccccgctgcctgtgcccaaatacgaacacacactggt

SEQ ID NO: 1029 - DNA, 192 bp, Homo sapien
actttacaacagaaaggaaggcaggcaagtaggacaggttgctaagcagcaagtagcaagcctagaaaccaatgatcctattttaggatttcaggcaacaaatgagagattatttgttcttactaccaaaaacctctttttaataaaagtaaatacagagaattaattattctaacatattggcctctttgt

SEQ ID NO: 1030 - DNA, 221 bp, Homo sapien
actgcttgttctctgtggaggagatgattaaaataaaaatcccagaaggacaggaggattctcaacactttgaatttttttaacttcatttttctacactgctattatcattatctcagaatgcttatttccaattaaaacgcctacagctgcctcctagaatatagactgtctgtattattattcacctataattagtcattatgatgctttaaagctgt

SEQ ID NO: 1031 - DNA, 306 bp, Homo sapien
  misc_feature (1)...(306): n = A,T,C or G
acagtgcccattccacgagggtggctgactttcaccttatgaaatactgcttaatgaagtatgaacaacccgaatgcttccctgtttcccaggagcgatttgcattttgaaagagaagtgtgttaatccagctggaatttgcctggatagtggagtcttcccagctgggcggggggacggtcttcancaggacattttctttctttatgctgcagcctcatcatgggaacattcantaagaacttgctcacccttctaccaccaaatctaccancccacttgcacctttagccacatcctgttaca

SEQ ID NO: 1032 - DNA, 352 bp, Homo sapien
  misc_feature (1)...(352): n = A,T,C or G
acacccccanggttnnaccgaacacgtaatgctgnaattggaaataaggacattaaattcaaacatttggaagaagcctttacatcanaacactggcttgttaggatatataaagtaaaagcacctgataacagggagacattanatcacaaacctcnagtcaccaacattttcccaaaacagaagtatttgtcaaagaagactaccaaaaggaagcgtggctacattaaaaataagctggtttttaagaaaggcaagaaaatatctaagaagactgtttaaatgcactgntctggttcctaacttgaannanttgtccttgtgagaaccggtctttgcctttagctcatgt

SEQ ID NO: 1033 - DNA, 385 bp, Homo sapien
  misc_feature (1)...(385): n = A,T,C or G
gtgttgagagcttctcagactatccacctttgggtcgctttgctgttcgtgatatgagacagacagttgcggtgggtgtcatcaaagcagtggacaagaaggctgctggagctggcaaggtcaccaagtctgcccagaaagctcagaaggctaaatgaatattatccctaatacctgccaccccactcttaatcagtggtggaagaacggtctcagaactgtttgtttcaattggccatttaagtttagtagtaaaagactggttaatgataacaatgcatcgtaaaaccttnagaaggaaaggagaatgtttttgtngaccactttggtttttntttttttgcgtgtggcagtttttaagtttattagtttttttaaaatcagt

SEQ ID NO: 1034 - DNA, 401 bp, Homo sapien
acctgttgctaggatctaataattttctcctgtgagtcactgcgcctggcccttttaataatttttaacagcaaaatttccttttggaattttagctggaagaattatttgatgcctggctgaaggtgatttcctgaagagggaatatatgtttgcctcttcctgaggtctgggggcactaacatttagggtcctttaaatttcgtttgagttttgtcagccaaaatcagaaaatattaattcaggctgcaaatttctgtgcagactgagatgtggttatttcttaacagcatttttcccttccctctacccagcactaatgctttggatgtatgagtttccttacagatccccaggaaactgactgagaaagtaaacacctttatttctagtttacctgt

SEQ ID NO: 1035 - DNA, 195 bp, Homo sapien; identical to SEQ ID NO: 8

SEQ ID NO: 1036 - DNA, 287 bp, Homo sapien
  misc_feature (1)...(287): n = A,T,C or G
acactgatctgncatcgcaccactgcactccggcctgggcgacaaagtgagactgtctaaaaaataataataataaaaagcattttgaaattagtcgcggtcaatgcaattctactctttggaatccgtttagctaaatgaatgtagtgctcttgttgaatggaaacaggtgataggaaatgcctaccatttgactcaatatggataatcaagagttgctcaggatgcttggatctgggggtagattctcatttcatcattgccctggcacatgtcaattactacat

SEQ ID NO: 1037 - DNA, 346 bp, Homo sapien
  misc_feature (1)...(346): n = A,T,C or G
acccagacaggatcatnaacacgtttagtgtggtgccttcgcccaaagtgtcanacacagtggtggagccctacaacgccaccctctcagtccaccanntcgtagaaaacacagacgagacctactgcattgataacgaagctctctacgacatttgcttcanaaccctaaagctgaccacgcccacctatggtgacctgaaccacctggtgtctgctaccatgagtggggtnaccacctgcctgcgcttcccaggccagcttcaatgctgacctgcggaagctggctgtgaacatngtcccgtttccccggctgcactttttnatgcccggctttgccccactga

SEQ ID NO: 1038 - DNA, 252 bp, Homo sapien
actgccaggggacagtgttgcctctgttgagccttggctgctgtgggaagctgtaggttcctgactgaggcctgaggtggtggtgctgtcagggaacgctattgtgtgcgttgggcctggtcggctgtgggaggtggttgatttttcactgacgcctgagcttgtcgtgcgggcaggtgagagtgttctgtctggtgatctggggctactgtagaaggtggtagatttctcactcaggcctgctgttgtggt

SEQ ID NO: 1039 - DNA, 431 bp, Homo sapien
actggatgggcttgtaaactacccaactatgatgctagggaaattgtgaacaatgtcagacgaatgctagatggcctggatcctcatcccatgcttccaaactacaaaaactttaaaggcacgattcaagaacttggtcaaaaccagtatgcagtcagtggtgaaatatttgtagtggacagaaacacagtagaaattacagagcttccagttagaacttggacacaggtatataaagaacaggttttagaacctatgctaaatggaacagataaaacaccagcattaatttctgattataaagaatatcatactgacacaactgtgaaatttgtggtgaaaatgactgaagagaaactagcacaagcagaagctgctggactgcataaagtttttaaacttcaaactactcttacttgtaattccatggt

SEQ ID NO: 1040 - DNA, 178 bp, Homo sapien
  misc_feature (1)...(178): n = A,T,C or G
gctgcgtggcaggagaggttcanattttcccctggacggtaattggcctttgagggggaaatggtggggacatctgggccatanaggacattcnnggtgactgggtcactgcggttgacactcgctgggttctgtatttcacattcataggatcctgcatcgttccctttgacgctga

SEQ ID NO: 1041 - DNA, 195 bp, Homo sapien; identical to SEQ ID NO: 8

SEQ ID NO: 1042 - DNA, 150 bp, Homo sapien
  misc_feature (1)...(150): n = A,T,C or G
acatactggcctctnngattacatagatcagccattaaaataaaacaagccttaaaaaaaaaaaaaaaaaaaaaaaaaaaaaaaaaaaaaaaaaaaaaaaaaaaaaaaaaaaaaaaaaaaaaaaaaaaaaaaaaaaaaaaaaaaaaaaaa

SEQ ID NO: 1043 - DNA, 603 bp, Homo sapien
  misc_feature (1)...(603): n = A,T,C or G
accaaaggatagctgttctgtttaagtagggacctctcatggcctacaggctttgacatctgagaatcaaactggagaacattccgaagccgttcttataagtgtctccatctctacctgggctgaaatggaatgtgcaaatgtagcccagcctggtccttgggtgttgccagttgattgatgactgggagccaaagtggcatctcctttgacctaaacgggcgatgatgaaataaaactcaacagcctttctctcatcttgcattgtgagatgcgaaatagagcgtgtctctctgcctctcattttaggctgaggccgtccaaagcggccatgccccatgtttccactagatggcgctgacacttcaggcatcaaccctcatggcctctcagccttgcaaaggcagccacttaaagtcggtgtcccgtgtggggcaccaagctgagctgcanacacccagtangcgcgaggcaaatgcgtcccattttaagaggcttgtatttatgagctctttgcttnctccctcccactatcttttaaagaattgctctccatctcctttggcaaagttcctttgccctttgtcttatttttgtgaaacc

SEQ ID NO: 1044 - DNA, 342 bp, Homo sapien
accgcggccgttaaacatgtgtcactgggcaggcggtgcctctaatactggtgatgctagaggtgatgtttttggtaaacaggcggggtaagatttgccgagttccttttactttttttaacctttccttatgagcatgcctgtgttgggttgacagtgagggtaataatgacttgttggttgattgtagatattgggctgttaattgtcagttcagtgttttaatctgacgcaggcttatgcggaggagaatgttttcatgttacttatactaacattagttcttctatagggtgatagattggtccaattgggtgtgaggagttcagttatatgtttggg

SEQ ID NO: 1045 - DNA, 177 bp, Homo sapien
  misc_feature (1)...(177): n = A,T,C or G
accattggtggccaattgatttgatggtaggggagggatcgttgacctcgtctgttatgtaaaggatgcgtagggatgggagggcgatgaggactangatgatggcgggcaggatagttcnnacggtttctatttcctgagcgtctgagatgttagtattnnttagcttttgttgtg

SEQ ID NO: 1046 - DNA, 186 bp, Homo sapien
  misc_feature (1)...(186): n = A,T,C or G
actggatggacctctcncanacagcatggaggcagtggcgttcaacaagcactatcagatcaatgacatctacagttgcagctggggaccagatgacgatgggaagacagtggatggcccccatcancttggaaaggctgccttacaacatggggtgattgctggtcgccagggctttgggagcat

SEQ ID NO: 1047 - DNA, 134 bp, Homo sapien
  misc_feature (1)...(134): n = A,T,C or G
acacactgaagtgnctctgtgtcacacaggtatttcttggtcctctggagagcagaggactcactcanctctttgcttcatgcctcgctttaatggtagtaaacacttaaccagtggaatagtctgactgctgg

SEQ ID NO: 1048 - DNA, 448 bp, Homo sapien
  misc_feature (1)...(448): n = A,T,C or G
acattggaagcttttgnttataggaacttgtagggctcattttggtttcattgaaacagtatctaattataaattagctgtagatatcaggtgcttctgatgaagtgaaaatgtatatctgactagtgggaaacttcatgggtttcctcatctgtcatgtcgatgattatatatggatacatttacaaaaataaaaagcgggaattttcccttcgcttgaatattatccctgtatattgcatgaatgagagatttcccatatttccatcagagtaataaatatacttgctttaattcttaagcataagtaaacatgatataaaaatatatgctgaattacttgtgaagaattgtatttaaagctattttaaatgtgtttttatttgtaagacattacttattaagaaattggtttattatgcttacttgtttctaatctggtggtaaa

SEQ ID NO: 1049 - DNA, 338 bp, Homo sapien
acttaaaaagttttttaaaaaataattaaatgcactactcatctcaatgaaatttttcgttttcctattttctagaactttctaaaaaaggaaacaaagcaaaaacaacaacaaaaaaacctgtttgacttaaggacacttgctgatcttgacacttgataatactttaagaaatggaaaggttttcctaaatctaatacctgcttaatataatccactttggaagattcatctgaaagaaacatagggtttgatttttaatactaatataaaataatctgccttccaatcaaaacaaaaatgttttcaactgtatacgctcctcggttgtgttttgt

SEQ ID NO: 1050 - DNA, 392 bp, Homo sapien
acatatttaacactcagcttctataattagaaacaaatggcccatctggtttcatctaggcctctttgctatcctttcatctccaactggattattttaaagcaaattctagatgacattctgctgagcatttctgccagaattacacctctctttgctaatgtgaaaaaatgcccatgataactgtaaaatacgtgtgtcctatttaggtgtctaaacactttaatgtcacagtattaaggccttaaaatatagcttagatatatttttctaaattaaaagacttcattttttagatatacagaaaattgagcagaaaacagtgagttcccatataccttcttcatcccaacaagtttttccccctcattaacatattgtgttagtgtggt

SEQ ID NO: 1051 - DNA, 369 bp, Homo sapien
actgattgagggtggcgttcgcctgctcgtagtttttactgacttccctcgtgtgaagtccgatgcttgcgttgcgcagggccagggtgtcatagatgcatgagctatctccgtcacagttggagatcaaatgttcagcccaggagctgtttttttgcagttgtgagtagaaaacaggggtgaagttggaaggcagctggtcattcctcttgccaaggaggcctgtcccgttgatctgccaggtcattccaaagtggaaaagcatctcctcagggctccctgggggaatggtggagccattgggcatcctgaagtcgtcctctggattgttattccagacccccaggagcccctccgtgcggttctggt

SEQ ID NO: 1052 - DNA, 184 bp, Homo sapien
  misc_feature (1)...(184): n = A,T,C or G
acctgtgggttcatnacctatgggtttatatcctcaaatacgacattctagtcaaagtcttggtaatataaccaatgttttcaaatgtattctgtcatacaaagagcagatttttattgaacttgtgcaataactatattaccatacaatataaatattcatgaatagttncccaagtntggta

SEQ ID NO: 1053 - DNA, 356 bp, Homo sapien
acatgaaactccagcagatttaatattggcatccatcatctagtcagacctctcacatgttcttcaaatcaatcaaatttgggattctcaacattttctgtgtcaataaaaggtgtggaattagtagattcgatgaagacctgtttttccttgccacattggacttccagacgccatttggattgggtttagaagatggggaaatttagaagacgtttcttggcctgagtctcttaagagtagagatgcagaagagagagtgagaccacgaagagactggctgttgactgcagggcaccaccagccaccttggtggtggcattagttggatttggggccaacccagagttggaagt

SEQ ID NO: 1054 - DNA, 518 bp, Homo sapien
acggtttaatgttaatgcaaatgacagtatcctgcatagcatcatagtttcacccattctattttaggtgaggggatatggaggagatggggcagtgatctacaaatgggaagagacatctaagggacagtcctattgccaaggaaaaaccatttggggaagcctactgccccaaagaacaattctggtctaggctgcagcactgtcaccttaggcagctgcaagctctctccccttcaggcccttgtttgtaaaggcaaggcagagaaccatactcaacgtgtgagagagcactccgcaaatgccacggctgcgcatgggcgtttaagatcaccacggggctcccaaatcatggaccaagcaagttcaggagatgcggtgcagatggctgcacatggtaggaaatgcttcctgggctgctgtcctaaaggcagaattcagcctggcccttctctgggccccagttaccctctcagtggctcacaggtcagtatccgtaacaaacatgttttttcttc

SEQ ID NO: 1055 - DNA, 195 bp, Homo sapien; identical to SEQ ID NO: 8

SEQ ID NO: 1056 - DNA, 363 bp, Homo sapien
  misc_feature (1)...(363): n = A,T,C or G
ccgccttttacttccgcccgcttcttctggtcactccgccaccgtagaatcgcctaccatttggtgcaagcaaaaagcaatcagcaattggacaggaaaagaatggcattgaagcagatttccagcaacaagtgctttgggggattgcagaaagtttttgaacatgacagtgttgaactaaactgcaaaatgaaatttgctgtctacttaccaccaaaggcagaaacaggaaagtgccctgcactgtnttggctctcangtttaacttgcaacagaagncaaaaattttatattcaaaatctggttatcatncagtctgcttcagaacatgggtctttgttgtcattgctnccagataccagc

SEQ ID NO: 1057 - DNA, 73 bp, Homo sapien
  misc_feature (1)...(73): n = A,T,C or G
actgcggcgnntangcctaagattgtgggggcaatgaatgaagcgaacanattttcgttcattttggttctca

SEQ ID NO: 1058 - DNA, 504 bp, Homo sapien
  misc_feature (1)...(504): n = A,T,C or G
acgatggggataatatactggcaagctactttgcagagttggtttaaggataagaatgtatgagaagtatactgagttcctaagaaggaaaacctcaaaacacggtggctatcattaaaatgttttaagttcttcataaaaataacatattattcctcaaattacagaggtctctaatagtgatggggaaaaattgttctttgcaaaatagaaatatttttccactatttctgaacctaacaactttgaaagcattcagcagtttctctaagattatttaaagcaaagcgctcatgatgtattttacaattagatactcttagatacgtgttctctgtgctgagtcttaagcaattgccagattcaccaattagttttttaaaagtagaaaacattttaatcaactcaactgaaaagcgttttagggggaaatcaataattttggtaagtgggttaacagtaaacattagcggctgacttttgcacagcanatagattctagtg

SEQ ID NO: 1059 - DNA, 275 bp, Homo sapien
acgacgagtcgggcccctccatcgtccaccgcaaatgcttctaaacggactcagcagatgcgtagcatttgctgcataggttaattgagaatagaaatttgcccctggcaaatgcacacacctcatgctagcctcacgaaactggaataagccttcgaaaagaaattgtccttgaagcttgtatctgatatcagcactggattgtagaacttgttgctgattttgaccttgtattgaagttaactgttccccttggtatttgtttaataccctgt

SEQ ID NO: 1060 - DNA, 350 bp, Homo sapien
acaggggtggcaaaatatgcctgacggatcatttcaaacctttgtgggccaggaatgtgcccaaatttggactagctcatctcatggctctggggctgggtccatggctggcagtggaaatccctgacctgattcagaagggcgtcatccaacacaaagagaaatgcaaccaatgaagaatcaagccactgaggcagggcagagggacctttgataggctacgatactattttcctgtgcatcacacttaactcatctaactgcttccccggacaccctccacctctagttgttactaagtagctgcagtaggcattgctggggaagaaacaaacacacaccaaacagta

SEQ ID NO: 1061 - DNA, 154 bp, Homo sapien
actggacaaagaaaactgatatttactataaagaaaatcccagccttctgtgctctgggcccccacagcaaacactgccaaggtcacgtcgacaggcaggctcaagtttccattggattccttccactttctgaaatagccttctgccctctgt

SEQ ID NO: 1062 - DNA, 385 bp, Homo sapien
acactttatcccttcacctataacagcttgtattttcgtgtgcagttttatgattactcaaattgcacttgtagatatatcttaacaaacacttcatacaaaataagcataggattattttattcaccaaagtattgttaattagcagagctcaattctttggtgtcagtttatcaaatttaccttctaggttttgagtttattattaagaacctgcgtagacttattttattttttaatacataggatcttttgccagaaatgagggcatactggcctggcgtaattcactcgtttcccaatcgcagccgcttctggaagcatgagtgggaaaagcatgggacctgcgccgcccaggtggatgcgctcaactcccagaagaagt

SEQ ID NO: 1063 - DNA, 195 bp, Homo sapien
acgcccttttcctaacactcacaacaaaactaactaatactaacatctcaggcgctcaggaaatagaaaccgtctgaactatcctgcccgccatcatcctagtcctcatcgccctcccatccctacgcatcctttacataacagacgaggtcaacgatccctcccttaccatcaaatcaattggccaccaatggt

SEQ ID NO: 1064 - DNA, 172 bp, Homo sapien
acagaactaaattttttaaactttatttgctgttaaattctgtgaagtttcagttatctaaaataaatatacacaaatatgaaatataatgtttcagattgcaaggtaatatgtaatagtagtgtttgtaagatactcttgtctaatattaactagtagtattttgatttgt

SEQ ID NO: 1065 - DNA, 173 bp, Homo sapien
actgggcacacctccagccctccctcttccactgaaggccattgcctattcctagaaagttctttcccaggtatgcagctttcagtttccacttcagaggccacagtgtctggggaacggactgcccccaatactaaagggagtcaaatctctttaattccgcactcctcagt

SEQ ID NO: 1066 - DNA, 343 bp, Homo sapien
acacataaacctatttataaaacacatctctatgctttttttttttgcttctaaatataaattttgctatttagccatcagctaaatataaattttgctatttagccatcagctaaatgatctaaatgcaaaccccaaagtttccagttaaaagtataaaatctgcttctaaccacagcagcatactgcttcaagtattctcctcctatgtaaggtcgagataattttgtcacatatgaattttaggtggacatctcatttcctcacatattagacatcctgctggggtcacagcttctttgttccatttgtctttttttgttgttttttaataagacattgc

SEQ ID NO: 1067 - DNA, 147 bp, Homo sapien
acacatttaactccccaggttaaacaccctgtaatttaccttgaagctctttacattctgaagttatataaaattaagcaggaaaacattaacattaaatgaaaatcaattttgcacaaataagtgtgatcaagtagcttaaatcac

SEQ ID NO: 1068 - DNA, 218 bp, Homo sapien
  misc_feature (1)...(218): n = A,T,C or G
acaaactttannancaatgttagtatgtcataaaatataacattacagcttatttaaaaccaaatatagttgaacatatttaaaatacattttcacagaatggatgaattagttgtttcttcagagttacttatgaacagttgaatgctttaaaatgttctgtctgtaggtaacatctaaaacacaagtgggtttattttaaatttttaaaatttgaa

SEQ ID NO: 1069 - DNA, 490 bp, Homo sapien
  misc_feature (1)...(490): n = A,T,C or G
acaggattccttanagggtgaggccagagtgttcctggaccccaacatactgtctgacgatggcacagtggcactccgaggttacgcgttcagcgaagatggtgaatattttgcctatggtctgagtgccagtggctcagactgggtgacaatcaagttcatgaaagttgatggtgccaaagagcttccagatgtgcttgaaagagtcaagttcagctgtatggcctggacccatgatgggaagggaatgttctacaactcataccctcaacaggatggaaaaagtgatggcacagagacatctaccaatctccaccaaaagctctactaccatgtcttgggaaccgatcagtcagaagatattttgtgtgctgagtttcctgatgaacctaaatggatgggtggagctgagttatctgatgatggccgctatgtcttgttancaataagggaaggatgtgatccaantaaaccgactctggtacctgcc

SEQ ID NO: 1070 - DNA, 200 bp, Homo sapien
gtcttggtgaggtgccgccatttcatctgtcctcattctctgcgcctttcgcagagcttccagcagcggtatgttgggccagagcatccggaggttcacaacctctgtggtccgtaggagccactatgaggagggccctgggaagaatttgccattttcagtggaaaacaagtggtcgttactagctaagatgtgtttgt

SEQ ID NO: 1071 - DNA, 84 bp, Homo sapien
acttattgtcgcaatttttttttttttttgatacagggtctcgctgtgttgccccaggctggagtgcagtggcactgatcacgt

SEQ ID NO: 1072 - DNA, 214 bp, Homo sapien
actagaatcaattaattctttttccatccctatctgtggagtggtttccaagtatttcttttggaaaaatacgtgatagtcaagatgggggacaagtagagaaagaaaaataaaaaatagaactcctaaaggattctgtaatctttgaggtgccagcctttttaagaatggattttagcaaggcacttgataaaatctctcatgaagtcctcgt

SEQ ID NO: 1073 - DNA, 317 bp, Homo sapien
gcatttacaactgctacaaaaatgccagcactccatcgacatgaagaagagaaattcttcttaaatgccaaaggccagaaagaaactttacccagcatatgggactcacctaccaaacaactttctgtcgttgtgccttcatacaatgaagaaaaacggttgcctgtgatgatggatgaagctctgagctatctagagaagagacagaaacgagatcctgcgttcacttatgaagtgatagtagttgatgatggcagtaaagatcagacctcaaaggtagcttttaaatattgccagaaatatggaagtgacaaagt

SEQ ID NO: 1074 - DNA, 68 bp, Homo sapien
  misc_feature (1)...(68): n = A,T,C or G
ggcgggtacncctannactgtgggggcaatgaatgaagcgaacagattttcgttcattttggttctca

SEQ ID NO: 1075 - DNA, 369 bp, Homo sapien
  misc_feature (1)...(369): n = A,T,C or G
actttattttaaatacattaatttttaaatgctgctcatctttttctcatctggtggcaaaatactagtgcaactttcatcaaaataaagtttaccacagatgtaaataaattttcccaattgaaaatggcccttcagtggccattaaataaaatttctcaacctaacttaagtgaaaaagaactggtggttgtcattataagcaaaaatataaagtattatagcatcatctacattgctccttacaacacaaactttgaaagaaccagagatgctttataggagttcagttggttttgagaaggcacatgggtgtggatttttttttttttttttaacattctagaaattttgncaccaccactcttt

SEQ ID NO: 1076 - DNA, 220 bp, Homo sapien
actcaaaatataagcagcttgaaactggctttaccaatcttgaaatttgaccacaagtgtcttatatatgcagatctaatgtaaaatccagaacttggactccatcgttaaaattatttatgtgtaacattcaaatgtgtgcattaaatatgcttccacagtaaaatctgaaaaactgatttgtgattgaaagctgcctttctatttacttgagtcttgt

SEQ ID NO: 1077 - DNA, 291 bp, Homo sapien
  misc_feature (1)...(291): n = A,T,C or G
gaagagtggaaatggggaactcccccagaggtggatactggggggcaggcctcccaagctgatggacatgagagtagggccctgacaggccttcctcctctcaaacctggcagatgggggcctctctggaagagggaggggccctgtcactgtccagagtctctttttacacttcacctccttctgcagtcagactgaaatataaaaaaggtggtggtggtggtgaaggggctggtggagatgtangaaccgatctgctatttttaatttcctgtgaggatagagacttgc

SEQ ID NO: 1078 - DNA, 418 bp, Homo sapien; identical to SEQ ID NO: 310

SEQ ID NO: 1079 - DNA, 166 bp, Homo sapien
atcatacatactttacaagcaagttaaatggagataaagttgaaatcatagaagatgcaaatgacctttcaaaatcaacacaatgtgttctgaaactttcgtgactaataccatgcatctgtgatcaatgaactatgtggttttgaatcggatgtagaccattagt

SEQ ID NO: 1080 - DNA, 345 bp, Homo sapien
  misc_feature (1)...(345): n = A,T,C or G
ttttttttttttnngtcttcaaatggcttttttaaagtgaaaattaacttagcatattaagacaaagacaatagaaataatatacataattttattacaaaattttttttaaaaaaacgaaatgcaacatcctaaaaaacccaaaatttactattgatactaattcctacaagtttgctgtgctaccatacacaagaaattaaaaaaaccattaaatatttaggaacattcaacatcagaagctgtaaaatctaactgtatgagtagcccatcaaaaagctacaacctgcattttttaaaagtattttctctacagagaatcttatcagctatacaaaaatctgt

SEQ ID NO: 1081 - DNA, 297 bp, Homo sapien; identical to SEQ ID NO: 459

SEQ ID NO: 1082 - DNA, 512 bp, Homo sapien
accaactaggagacacaataatcctattagtttgttctcccaaacccactccagtttatcaggtaatatgctctgtaaggttctttccaaccccattagcacatacatagattacctataatttcacctaatgtaatctaccttcctactgaggattgaggttttaacgtttgtttttttccccccactttcttgatcagtgattctcaaccatgtaggaattaatgaaaccaattctgtatcaccactgcaaccaagacagcaataccaagtgatatgtatttttcaaactaatgtcattttgttctctatactgtaaaaaacgagaagatgcagtcctcaacttagaactcaatactaggaagggtcaagttgtcaaaaaatgtctttcaacagtagaaaagtttgctttcaaattaaaaaacaaagcacgtattgcaaacatcgtgtaatgataaaattacagaaaaaaatatattcagaatgacccatggcattcacgccataccaga

SEQ ID NO: 1083 - DNA, 514 bp, Homo sapien
acgaggtggctcgactgctcaacctcaccgagaggcaggtcaagatctggttccagaaccgcaggatgaaaatgaagaaaatcaacaaagaccgagcaaaagacgagtgatgccatttgggcttatttagaaaaaagggtaagctagagagaaaaagaaagaactgtccgtcccccttccgccttctcccttttctcacccccaccctagcctccaccatccccgcacaaagcggctctaaacctcaggccacatcttttccaaggcaaaccctgttcaggctggctcgtaggcctgccgctttgatggaggaggtattgtaagctttccattttctataagaaaaaggaaaagttgaggggggggcattagtgctgatagctgtgtgtgttagcttgtatatatatttttaaaaatctacctgttcctgacttaaaacaaaaggaaagaaactacctttttataatgcacaactgttgatggtaggctgtatagtttttagtctgtgtagtta

SEQ ID NO: 1084 - DNA, 480 bp, Homo sapien
acaaagcagcaactgcaatactcaaggttaaaacattagaaaagcatttgtgtgacaggtatattacagtattatcaaaatattacattttcagacttacttagcagataatcatccaccagagcttaaatctttaaattatttccatagtcttaaaaaatatgtaatgtcagaatgcatataaaaagaatgtaaaaggaaacctaaaatacaaatggaataatgtaacaaataaatatttgatttcagtaactgttaataatcagctcaacaccaccattctctctaaactcaatttaattcttataggaataatgaactgtcaaatgccatggcataattatttatttccaagctatcatcaatgattagaactaaaaaaattttggcataaaaaaatcacaattcagcataaataaagctatttttagcttcaacactagctagcatctctaagaattgttgaaataagtacctcgg

SEQ ID NO: 1085 - DNA, 478 bp, Homo sapien
gttctggggcttgtcctcctttctgttacggtccagggcaaggtctttgaaaggtgtgagttggccagaactctgaaaagattgggaatggatggctacaggggaatcagcctagcaaactggatgtgtttggccaaatgggagagtggttacaacacacgagctacaaactacaatgctggagacagaagcactgattatgggatatttcagatcaatagccgctactggtgtaatgatggcaaaaccccaggagcagttaatgcctgtcatttatcctgcagtgctttgctgcaagataacatcgctgatgctgtagcttgtgcaaagagggttgtccgtgatccacaaggcattagagcatgggtggcatggagaaatcgttgtcaaaacagagatgtccgtcagtatgttcaaggttgtggagtgtaactccagaattttccttcttcagctcattttgtctctctcacattaa

SEQ ID NO: 1086 - DNA, 257 bp, Homo sapien
  misc_feature (1)...(257): n = A,T,C or G
actatagggtaaatncgggccctatttcaaagatttttaggggaattaattctaggacgatgggcatgaaactgtggtttgctccacagatttcagagcattgaccgtagtatacccccggtcgtgtagcggtgaaagtggtttggtttagacgtccgggaattgcatctgtttttaagcctaatgtggggacagctcatgagtgcaagacgtcttgtgatgtaattattatacgaatgggggcttcaatcgggagt

SEQ ID NO: 1087 - DNA, 265 bp, Homo sapien
cacaccctgagcaagaaggagctgaaggagctgatccagaaggagctcaccattggctcgaagctgcaggatgctgaaattgcaaggctgatggaagacttggaccggaacaaggaccaggaggtgaacttccaggagtatgtcaccttcctgggggccttggctttgatctacaatgaagccctcaagggctgaaaataaatagggaagatggagacaccctctgggggtcctctctgagtcaaatccagtggtgggtaattgt

SEQ ID NO: 1088 - DNA, 375 bp, Homo sapien
acaaaagcctcatgaaggtcctggagaaatggggaaaccagtcgtcattcctaaagaggatcaagaaaagatgaaagagatgtttaaaatcaatcagttcaatttaatggcaagtgagatgattgcactcaacagatctttaccagatgttaggttagaagggtgtaaaacaaaggtgtatccagataatcttcctacaacaagtgtggtgattgttttccacaatgaggcttggagcacacttctgcgaactgtccatagtgtcattaatcgctcaccaagacacatgatagaagaaattgttctagtagatgatgccagtgaaagagactttttgaaaaggcctttagagagttatgtgaaaaaactaaaagt

SEQ ID NO: 1089 - DNA, 364 bp, Homo sapien
cccttagagtcttggttgccaaacagatttgcagatcaaggagaacccaggagtttcaaagaagcgctagtaaggtctctgagatccttgcactagctacatcctcagggtaggaggaagatggcttccagaagcatgcggctgctcctattgctgagctgcctggccaaaacaggagtcctgggtgatatcatcatgagacccagctgtgctcctggatggttttaccacaagtccaattgctatggttacttcaggaagctgaggaactggtctgatgccgagctcgagtgtcagtcttacggaaacggagcccacctggcatctatcctgagtttaaaggaagccagcaccatagcagagt

SEQ ID NO: 1090 - DNA, 346 bp, Homo sapien
actagaactaccttaagtatgctgtgctttcttttcaagtgaggtatctatattgaggaaaaaaatcttataaattccttttacattaaactaatttaatacactattttgttttctgggctgaatttttaaatttttttcttacatttgatcactttctaattcaaaaattgtagcactacataggacatttaattctattactaaataggctccaaattacattatacagtttagaaaccatttcaatgaatggatttacaaaaaaaaaaaaaactgtccttttaaatgaaatgcaatataaaatactaatacacttttcttccaaaagtggaaatgcttaagt

SEQ ID NO: 1091 - DNA, 423 bp, Homo sapien
  misc_feature (1)...(423): n = A,T,C or G
gcggtgtatagcacnnatggttaattctcaagctgctaacattcgatctggatggaagaacattttctctgtatttcatctagctgcatctgatcaagatgaaagcatagtggaacttgcattccaaacaaccgggcacattgtcacccttgtatttgaaaaacactttccagcgaccattgattctttccaggatgcagtgaagtgtttgtctgaatttgcgtgcaatgcagctttcccagacacaagtatggaagcaattcgacttattcgccattgtgcaaaatatgtgtctgatagacctcaggctttcaaggaatacacaagcgatgatatgaacgtagcacctgaagacagggtgtgggtgagaggatggttcccaattctctttgagttatcctgtatcatcaatagatgcnaatt

SEQ ID NO: 1092 - DNA, 405 bp, Homo sapien
acatatatgtatatttccttttttaatacaggataataatatggggtcttgtccttcacctcttaagttcagggaacagtttgtcctgaccacacatatgttatcagtgtaatgctttatgaagctttagaaatgagctcatgactcattaaaaaataataaacgatgctattttaatattttcaaataaataatctgaggatgtgtttcatactttagcatcaacgctgagttgtgccttgtagaattgcattgtctatacatgcaaaagactattaagttaggatgaactagattccctaattacagtgaaattctatcttgcaaatgctatagaataacttgcattttaaagtgtatttgcacattttacatatgctatgtggttgcctttgggttttctgt

SEQ ID NO: 1093 - DNA, 330 bp, Homo sapien
actgattttaaaaactaataacttaaaactgccacacgcaaaaaagaaaaccaaagtggtccacaaaacattctcctttccttctgaaggttttacgatgcattgttatcattaaccagtcttttactactaaacttaaatggccaattgaaacaaacagttctgagaccgttcttccaccactgattaagagtggggtggcaggtattagggataatattcatttagccttctgagctttctgggcagacttggtgaccttgccagctccagcagccttcttgtccactgctttgatgacacccaccgcaactgtctgtctcatatcac

SEQ ID NO: 1094 - DNA, 323 bp, Homo sapien
cggcgacacctcgcagtcattcctgcggcttgcgcgcccttgtagacagccggggccttcgtgagaccggtgcaggcctggggtagtctcctgtctggacagagaagagaaaaatgcaggacactggctcagtagtgcccttgcattggtttggctttggctacgcagcactggttgcttctggtgggatcattggctatgtaaaagcaggcagcgtgccgtccctggctgcagggctgctctttggcagtctagccggcctgggtgcttaccagctgtctcaggatccaaggaacgtttgggttttcctagctacatctggt

SEQ ID NO: 1095 - DNA, 321 bp, Homo sapien
acaagttctgtgcataagatccaaggaattgcttactaatctgtaggcaaccctctttctaatcagaatcctttattcctcggctgcagatgagatagggcacaatctgttgtaaacagggcactgttgttaaaccaggataatattcttaaattaagatcgttcttgttctattaaaaagactttcccaagtgtcttccatcactgagtatattctgctgacctcttaatttcataaattaactttcttttgattccatttttatggtggtgtccgcagttttgttttaaaaattggtttaaatttatataaaactctgt

SEQ ID NO: 1096 - DNA, 299 bp, Homo sapien
  misc_feature (1)...(299): n = A,T,C or G
acagaaacatanagccttgtcttgactataaggtttagttggtgttttaataacaacaaaaaagcacaataagacacaaacactcttcaacaggtttactcaaacagcttcgctcaagaagaaaaaggcacagatttaaagggatgacaataatcattaagaatgaagtaaatggagactcagtcaaaaaatgatacttcatgaattaagtcaagaaaaacaaaagtctttcaaattatctgtcttccttaaaatgaatttttaaattaaattgtataaacatatgatataaagttggt

SEQ ID NO: 1097 - DNA, 225 bp, Homo sapien
  misc_feature (1)...(225): n = A,T,C or G
accaattttttttttactgtgcttcaaataaatagaaaaatagttataatattgatcttcaactttgccattcatgcttctatgcatattaggctacgtattccacattgaaagcatganagtgtctaggcctttgaatggcatatgccatttctgggaaatgcatctggaggctaagtattgctttctacaaataattgccccctttgttttaaaaagaagaaa

SEQ ID NO: 1098 - DNA, 123 bp, Homo sapien
  misc_feature (1)...(123): n = A,T,C or G
acctgtcaactgccctggcctgcccccangacccctatacctcccagcacagcaggcagcctccaggatcctatttagacctatggctcagcatctgttctgattcattgttgtcccctctgt

SEQ ID NO: 1099 - DNA, 190 bp, Homo sapien
acttcaaagccagtttcctataagcctttttcaattcttcctgagtagcattgggtttgacccccaaaacatcgtagtaagttgtttctttcaccatcttctactgccggtgcgggctgaggccggtgtgtgagggagcgggaaggagcgccgagctgtgcgcagccggggtagttaccgctcctccgcc

SEQ ID NO: 1100 - DNA, 255 bp, Homo sapien
acgtagtctaggccatatgtgttggagattgagactagtagggctaggcccaccgctgcttcgcaggcggcaaagactagtatggcaataggcacaatattggctaagagggagtgggtgttgagggttatgagagtagctataatgaacagcgatagtattattccttctaggcatagtagggaggatatgaggtgtgagcgatatactagtattcctagaagtgagatggtaaatgctagtataatatttatg

SEQ ID NO: 1101 - DNA, 385 bp, Homo sapien
actctcagtggggaccacctgctttcatcccctgacattgtgggagaaattttgcaatgtatgctaatcaaaatgtatttatatgttctctgctgatgttttatagaggtttgtgaagaaaattcaacctcagcaacttcagaaactgcccctgatacgtgtgagagagaaataaaatcagattttgagtgttgaagggactgaggaagtgaggataaagagcatgaggacagcatggaaagaaggaggcagaagtggaactgaactttcactctccatgggacagatcaatctcattatcaagtctgaatagcaaccagccctctcctccaccccgtttctcctcagttaattggagctcagtcaggtgattattgagtcttgt

SEQ ID NO: 1102 - DNA, 237 bp, Homo sapien
  misc_feature (1)...(237): n = A,T,C or G
gaacaaggccctcctttctccaggcctgggctacgggggagggagagcctgaggctctgctcagggcccatttcatctctggcagtgccttggcggtggtattcaaggcagttttgtancacctgtaattggggagagggagtgtgcccctcggggcaggagggaagggcatctggggaagggcaggagggaagagctgtccatgcanccacgcccatggccaggttggcctcttct

SEQ ID NO: 1103 - DNA, 318 bp, Homo sapien
acacctggcccctgaggacggacacctgcactttcccttccactcgctcctgggacttggcgatgtagtggcggacaaattcacactcagggctgtgccagaaaccggtatacaccagctcagcaaatttcaagcccaggccttgtttgattttgtgcacttcccggtccatggtgaaggcctcgatgtctaaatgagcatggtaaaggatggtgcctgctggggtctcgtagatacctcgggacttcattccaatgaagcggttctccacgatgtcaatacggcccacgccatgcttgcccgcgacttcgttcaggt

SEQ ID NO: 1104 - DNA, 422 bp, Homo sapien
actatctggctgcagagactttcttaggtcccgtgttagaccccatggggtctcagcatgtggtcatgtggtaatgcattcctttcaaaggctttgggctgaactcaagttggaaatacctggaaaagaccaagcttctcctttgggtgtctgcggatcctattaaaaatattcgtgatgttttaagttctccaatacaattttctccacgaaaacaagcatcagatacactacctctaagtatttattggaggggttccaacagcctcgtggacaggccttctcagcagctactgagtgccccctaggggtggggaggggccagtgcacatggaggcaaaccacagagcccttttgtggcctattattatgaagaactaaaatgtggccagtgaaccagtcagtgctcatcactacggggc

SEQ ID NO: 1105 - DNA, 487 bp, Homo sapien
acacaagtgatcaatttgtcacaacatgacaagttattgataacaagtattttaacttacaggtatgataaaagtctaacatttacaaaatggggatattactatataaaaaattgaaagtattagtttttgtgtaaaatattagtttcttcattctgatacagtgctaaacttaatgtaaagccaaacttcaggacctactctagacataaaataattttcatttccatgtctctagaatctaaaatgctaagtaaattttctctattacctttcgtcaaaataacttaaagtattaaaagacaacctaatgacagtaataacatttttctttcctaaaaaatatttggtatctgatttaaagacatgaataacacaatagtaacaacttaaagatcgacaagatatactaaaaatgatatttgggcatcatatctacataataattgtgaaacaactgttttcctaataactgagaagcaatcag

SEQ ID NO: 1106 - DNA, 172 bp, Homo sapien
acaaagatttttttacacaaagaaacttaatgctgtattaataaattcagtgtgtagcttcaattgggatagttccaaaagtgaagattttgtgaggaataagtgcaaattttttttttattttaaaaaattctttgaaactcttaagtctttgtgtctgcaatgaaattgt

SEQ ID NO: 1107 - DNA, 281 bp, Homo sapien
  misc_feature (1)...(281): n = A,T,C or G
acatatgtgtgagtgtgtgtatgtgtgtgtatgtgtgtgcgtgagtatgtgtgagtgtgtgtgtatgtgtgagtgtgtgtatgtatgtgtgagtgtgtgtgtggtgcancggatgacatactccgtctctgactcggtgagggccacgggctcangcgaggacttgaagaggggcccaagaccgcggaactctggcactgctgncaactgctcctggaanatctcctgcctggtagctgccactttctcangctgnttgactgctgngatgggggtacctc

SEQ ID NO: 1108 - DNA, 359 bp, Homo sapien
  misc_feature (1)...(359): n = A,T,C or G
accacctggatgtggacctttgctacctgtattaataccagtggcctcattttgctgtatcattacaatttggcttcttatattaatgtttgaaaaggattaaagctggtattctagaacatgcccttcactggttgtgtaaataaaactgtagaatgacacttcagatgaagttagtgtgattttaattgtgcactacaaccgagctgtaaccagttactaattttagaatgtaatcccaggacaatattaagcaaatagcctgcagtgcttcctgtgaaatagtgaaggaggagggcatttctgtattccaggacttcttggggttncagnntgggtntgnatgatttttttttttt

SEQ ID NO: 1109 - DNA, 242 bp, Homo sapien
  misc_feature (1)...(242): n = A,T,C or G
gcgagacctccgngcccgaccatgtcgtctggtccctgttcaacaccctcttcttgaactggtgctgtctgggcttcatagcattcgcctactccgtgaagtctagggacaggaagatggttggcgacgtgaccggggcccaggcctatgcctccaccgncaagtgcctgaacatctgggccctgattctgggcatcctcatgaccattctgctcatcgtcatcccagtgctgatcttccag

SEQ ID NO: 1110 - DNA, 226 bp, Homo sapien
actagaggaaaatatgggtgaatttttttttttttgcctatgattccaggattttaaaagttttagatgcccagagttgtggaggtatggagaagtggaccttctcatactgttggtgggaatacacaataatataatttgaccacgtaacaattctaggcacatgcatgctgtgactacttgctaggtgcatgaaggctcttgccaggggtggtcatggttcggt

SEQ ID NO: 1111 - DNA, 437 bp, Homo sapien
acacatttttttttattttaggtgtatcaagaaccaataaatctgtggcaaagagttaacctatgcatggtaaaatacataaaatacatattcctttgtttcataataaataaacctgtagcataataaagaatagtgcaaactaccattgaaaaagttgtataaataaaacaactcattatacatcaggaatattttgttctaataagtttacgatacataaattatccccccaaaagttcataccttttctatttgaaagggctttgaaagtgaataatatgaaaatcaaataaacttttaaaatgtaaaattatctcatattcaagttttaaggtctttttctttataaaggagggtctgcatgtttcatattcatcacaacaatcttgaagacaacattgaaaggctttccaagtgacagcaccatgcactgt

SEQ ID NO: 1112 - DNA, 360 bp, Homo sapien
  misc_feature (1)...(360): n = A,T,C or G
actattgacccagcgatgggggcttcgacatgggctttagggagtcataagtggagtccgtaaagaggtatctttactataaaagctattgtgtaagctagtcatattaagttgttggctcangagtttgatagttcttgggcagtgagagtgagtagtagaatgtttagtgagcctagggtgttgtgagtgtaaatcagtgcgatgggtangggaagggagcctactanggtgtagaatangaagtatgtgcctgcgttcaggcgttctggctggttgcctcatcgggtgatgatagccaangtggggataantgtggttttcnaagaagatatnnaatatgattacnttctgtggctg

SEQ ID NO: 1113 - DNA, 220 bp, Homo sapien
acatagtagaaaacctcaagagatgattgatatttggtctcagttgcagagtgctcatttaaaatgctaaaatagatacaaactcaattttgcatagaaaggtgtattttgaatagttcccatgttgtgttctcacattagagtaatttctatattaaaccatgaaaattgcctttatgagtgatgcccatttgagggcctctaaacccttcaatttggt

SEQ ID NO: 1114 - DNA, 373 bp, Homo sapien
accgcagtttgtgctgaatgatatgtttggggtaaatcagtttttttcttatagaatttcggcgtttttgctgcaactgccactaattttgcatttaaaagaacaaaagaggaatgtatttttcaaaggagtgaatgaggttaaaatcaagattttgaatggtataaatatgcaactaattcagttgtaggatattattaaattttttattgctaaatatgtttctttcatacgttgcagtgcttacagttccaacagctttccaagaaaacatttccatatttgtgttatttgtaaagtatacataaataatgtaaaataatttgggattatttcaactttacattgtatgtctgaatttcatcgatggtgt

SEQ ID NO: 1115 - DNA, 344 bp, Homo sapien
acaaatatgaatacattataatttgtaactgcatttaaaaattaaaatatttctctccaaatccaaaacaccacacaatctttatctgttctcatcttgttaccttagaaacatttgtcatatgctatcaggaaaatataggcaagacttactaatcagttattcatgatcaaagaaacatgattctccttaactgtgactttttgaatcatttatctgtatttctgaaatatcacacaattatacctctactctagagaaaaaaagaataaatacaaatatcaaggaggcaggaacattcatggaattaaagcaaaagtcacaagtgtttgacttagaaatgt

SEQ ID NO: 1116 - DNA, 378 bp, Homo sapien; identical to SEQ ID NO: 348

SEQ ID NO: 1117 - DNA, 382 bp, Homo sapien
actacatctgaggattccttggtcctttacaatagagtggctgttcaaggagatgtggttcgtgaattaaaagccaagaaagcaccaaaggaagatgtagatgcagctgtaaaacagcttttgtctttgaaagctgaatataaggagaaaactggccaggaatataaacctggaaaccctcctgctgaaataggacagaatatttcttctaattcctcagcaagtattctggaaagtaaatctctgtatgatgaagttgctgcacaaggggaggtggttcgtaagctaaaagctgaaaaatcccctaaggctaaaataaatgaagctgtagaatgcttactgtccctgaaggctcagtataaagaaaaaactgggaaggagt

SEQ ID NO: 1118 - DNA, 257 bp, Homo sapien
actatagggtaaatacgggccctatttcaaagatttttaggggaattaattctaggacgatgggcatgaaactgtggtttgctccacagatttcagagcattgaccgtagtatacccccggtcgtgtagcggtgaaagtggtttggtttagacgtccgggaattgcatctgtttttaagcctaatgtggggacagctcatgagtgcaagacgtcttgtgatgtaattattatacgaatgggggcttcaatcgggagt

SEQ ID NO: 1119 - DNA, 474 bp, Homo sapien
acagaaatgaggcgtcgcagaatagaggtcaatgtggagctgaggaaagctaagaaggatgaccagatgctgaagaggagaaatgtaagctcatttcctgatgatgctacttctccgctgcaggaaaaccgcaacaaccagggcactgtaaattggtctgttgatgacattgtcaaaggcataaatagcagcaatgtggaaaatcagctccaagctactcaagctgccaggaaactactttccagagaaaaacagccccccatagacaacataatccgggctggtttgattccgaaatttgtgtccttcttgggcagaactgattgtagtcccattcagtttgaatctgcttgggcactcactaacattgcttctgggacatcagaacaaaccaaggctgtggtagatggaggtgccatcccagcattcatttctctgttggcatctccccatgctcacatcagtgaacaagct

SEQ ID NO: 1120 - DNA, 423 bp, Homo sapien
  misc_feature (1)...(423): n = A,T,C or G
ttggattgccacacggctcacattgcatgcaagtttgctgagctgaaggaaaagattgatcgccgttctggtaaaaagctggaagatggccctaaattcttgaagtctggtgatgctgccattgttgatatggttcctggcaagcccatgtgtgttgagagcttctcagactatccacctttgggtcgctttgctgttcgtgatatgagacagacagttgcggtgggtgtcatcaaagcagtggacaagaaggctgctggagccggcaaggtcaccaagtctgcccanaaagctcaggaaggctaaatgaatattatccctaatacctgccaccccactcttaatcagtggtggaagaacggtctcagaactgtttgtttcaattggccatttaagtttantagtaaaagactggttaatgat

SEQ ID NO: 1121 - DNA, 413 bp, Homo sapien
  misc_feature (1)...(413): n = A,T,C or G
ggaagctgaggcccagagagcctagggagcttgccacaggttgcactccaggttggggagtgcagatttgaggtgggtttttgtcaaagtccacccttcctggcactgagctggttaagaggctacgatggagcctggacccctcacattggagcagtgcccaccgacagaccccgcataaaaaaggaacagaacagacctaaccaagaaatcaggtgagcccaccgcgctcccctggtgccttcatgaggatggaggcaggtgaagactgaattgtggacatttccagaatgacaagagttttttttttgnttttatttttgtttttgagacagagtttcattctcttgcccaggctggagtacagtggtgtgatctcggcctcactgcaacctccacctcccagcttcaag

SEQ ID NO: 1122 - DNA, 486 bp, Homo sapien
  misc_feature (1)...(486): n = A,T,C or G
acagacacaaacatataaatatatgtatgcacatatttgtcatacattttcaataaatgatatctttattattgtttaatgaccttttttctcttgtgaattttgacataaagtatattttataaaataagagagttgttgacttacgatgtattttgtataatacaattttgatctcttctgctctcgtttggttgatgtttgcctaaaatgtcttcttccacttgccactttcaggctgatttcactactagatctcaagtgactcttgaagagaggcaagttggatcttggtatataaaattttatataatccctctattcaatgtatgtgtattgattggcaagtctatttttaaaatatttattttctgaagacaaagattactgntattttattgtttaatgattcttgtangtctgtttctcattctatcnncctttgtgtctttttgatttttgtatggatangctgtcactactttc

SEQ ID NO: 1123 - DNA, 409 bp, Homo sapien
acggtttaatttggtgatatcttaagcctttcttcccatccttaactgttcaagtatgtctgttgtaaccaataagtttattgctgtgaaattacttctgatggtagagaaggggttctataactgcttttgttttgttttggataaatttcctgttgtgtgggtggcatttttcttaacgagatttgcttctgtcttagcctcacacagggaaaatatccatttatcttctctctcgtgcttaattaatagctttatctttttttataccattttatccttttctctttaacagaaagtaaatatgtataaaatttgaaggaatcgaactaacaatacattctgtgtatattattttaatgaagaaaataaattgattactggcattggaacagtataaaataccagt

SEQ ID NO: 1124 - DNA, 215 bp, Homo sapien
actacaagcccaccaagctaaagaggctgcccagaaagcagttaacagtgccaccggtgttccaactgtttaaaattgatcagggaccatgaaaagaaacttgtgcttcaccgaagaaaaatatctaaacatcgaaaaacttaaatattatggaaaaaaaacattgcaaaatataaaataaataaaaaaaggaaaggaaactttgaaccttatgt

SEQ ID NO: 1125 - DNA, 471 bp, Homo sapien
tttttttttcacttaaaagaaagtttttattaacaaaagttttccttaattcacatttcaactttattaaatagtccaagggtttcatttatgaacacttattccagtttagttctcttaaattcatttgcttgttgtgcatttatgtttaaaaaggtaactaactgcactggaaaatgaaaatttatagttttatcaataggtcagtttttaaaaaatcaaaggataaggatttaaaaatattagggcattacacctttttcagaacaaggataatttacagaaattatacaaagcagattttcatcaaatatcaattatttagcgatgttttatttagctgaaatgttatttcacttgtaaaaactatctccggttacaaaaaaaatcagaaaccttattaaatttaacctgcttttacaaatgtcctaagaagtcttaagctaaacaaaatttaagtaggaaaacgat

SEQ ID NO: 1126 - DNA, 432 bp, Homo sapien
  misc_feature (1)...(432): n = A,T,C or G
acccaatgaaggatccgatgaatggctggccagttactcagagtaatatgtttatgagttaaatggattgcataacggcaccacttttcctttgtcactgtggtggataaatgacaaagtagattccaatctcctgtatagaaaggtggttacccaatagcctcactggtggcttgctagcagagcctcaagttgcacctctgtggctttctgtaaattcgagtcctacagccacttcgagaacgctgcaatccccaaggcccacttggtccatgctgaagaagcggctgtgaccccaatcctgcctctcttttgctcttcagtattacttactggaggaatatgtaatattctaggtcaagtctaggagaggctcatcctaaaaaaaaattgcaaagtnttttctcaattaaaaacaaaaaagcctcaagt

SEQ ID NO: 1127 - DNA, 94 bp, Homo sapien
  misc_feature (1)...(94): n = A,T,C or G
acacaaagaccaatgcatggtnctgtattgctaccaaaacatttactgtatatatgtttataacatgtattatgtatatatgtaatgggtgcca

SEQ ID NO: 1128 - DNA, 284 bp, Homo sapien
acttctcatgagttatcactcagttttgcttctagagacccaccagtcaaagcagtaaaactaaatctccttaacaaaactgaagtcttcagaaaagcagtgctaaatgggtgatgaaaccttacttaaccactccctgtatgcaagatgacttattttgcattcctaaaacttctactttgattctcaatatatccgtttttttttctttttttcaaaagcattattttggtgaaaatcccaatatatgagtttaaaaaaaaatcattaacatcattaacagt

SEQ ID NO: 1129 - DNA, 470 bp, Homo sapien
acattttaatttttataaagaaatgagcagttatctccctgacaccttattaaatgtataattaaccttatgatccctagctcacttgtgaatgcttggcagtataattggagaggaataatgtttctttttttcctctttctttgcagtcctaaaccttattctgtggttgttgaagcattagtttaatttttcccttttctttttaaacaaactttatacttgcaatgccaaggacagcattcaccaaagcttggcatagcttgcacttgttttcttttttcttgccttaaaaaataatagtcgactattaggccttcctattggtaataatacactactgtattattgtgaactttcttaattggaaatattcagtttgatccacttgtttatcagaaaccttcacttactgaataatgttttaatttttagagatgtggtgcaattgctgaacaaaccccgatttt

SEQ ID NO: 1130 - DNA, 373 bp, Homo sapien
acctgaggggctcctgaaagacctactgccaggaccagtgaccctggtgatggaacgctcggaggagctcaacaaggacctaaacccttttacgcctcttgtaggcattcggattcctgatcatgcttttatgcaagacttggctcagatgtttgagggtccgcttgctctcactagtgccaacctcagctcccaggccagttctctgaatgtcgaggagttccaggatctctggcctcagttgtccttggttattgatgggggacaaattggggatggccagagccccgagtgtcgccttggctcaactgtggttgatttgtctgtgcccggaaagtttggcatcattcgtccaggctgtgccctggaaagt

SEQ ID NO: 1131 - DNA, 174 bp, Homo sapien
  misc_feature (1)...(174): n = A,T,C or G
actagaggctaatgcagttctcttgggaatccaggagagtaaagactcaagatcgaaagaagaacatcatgaaaaataaatgaactttgcttagtggattgactcctttgctgaagtcagttattncatncaagaatgcaattagactaattgtgaataaatgattgaatgaag

SEQ ID NO: 1132 - DNA, 476 bp, Homo sapien
cagcgcctgcttcctcggccctgaaatcatgcccctaggtctcctgtggctgggcctagccctgttgggggctctgcatgcccaggcccaggactccacctcagacctgatcccagccccacctctgagcaaggtccctctgcagcagaacttccaggacaaccaattccaggggaagtggtatgtggtaggcctggcagggaatgcaattctcagagaagacaaagacccgcaaaagatgtatgccaccatctatgagctgaaagaagacaagagctacaatgtcacctccgtcctgtttaggaaaaagaagtgtgactactggatcaggacttttgttccaggttgccagcccggcgagttcacgctgggtaacattaagagttaccctggattaacgagttacctcgtccgagtggtgagcaccaactacaaccagcatgctatggtgttcttcaagaaagtttctcaaaaca

SEQ ID NO: 1133 - DNA, 328 bp, Homo sapien
gccgcatcttcttttgcgtcgccagccgagccacatcgctcagacaccatggggaaggtgaaggtcggagtcaacggatttggtcgtattgggcgcctggtcaccagggctgcttttaactctggtaaagtggatattgttgccatcaatgaccccttcattgacctcaactacatggtttacatgttccaatatgattccacccatggcaaattccatggcaccgtcaaggctgagaacgggaagcttgtcatcaatggaaatcccatcaccatcttccaggagcgagatccctccaaaatcaagtggggcgatgctggcgctgagt

SEQ ID NO: 1134 - DNA, 416 bp, Homo sapien
actgaattcagtgcttagaactgaagttattgagaggacagctttaaaagatgaatgaactcaaaagttcgagttgtgctcttcacgttggttcgataatggcctttatttgaaagctttttaatttttctttacagtaaatattccattctgatttcataaattaaacatttatgcctcccttttgtgttgacactgtagctcatactggaaaagtcgatcaatgttttgcagtttattgaaagtagttctatatataacaatgttataagcatttctttagaaatggttgaaaatgcttctaaaatgtgattatcgaccatggtatgcatgatcgttgtaattgttgacattccttttagaagttgtgaaatgttacaacttgtgcttatgtagacacaatcttctgtctcagt

SEQ ID NO: 1135 - DNA, 254 bp, Homo sapien
acagaaaagccactatttatacattgttactaagacaaggaagattcagttcaactcaacttgctcttagaataagggtaaaaagtaaattaacaagtaagtgaagtatgatgttgttgccactgacattacaggtggaaatataagggaaatttaaaccagaaaaatgacacaataactttaaagaggagctgaaactttgtcaaaaaaagaaaaaaactattagcctgttttcaaagaaaaacattctaaaa

SEQ ID NO: 1136 - DNA, 463 bp, Homo sapien
acacaatggtttattaaaggaatgtatggcccacatcaacctagcaaggattctactggtaaaccttcccatggccaaaggaaaaacaagcaggagttgagtggctggggtggggtgcaggcaatggagagagggccgaagggtgtagaagctgaagggggctagaagcttactcctgagtttcttccttctgtcttcaaatctttacttcttatggccaaagacccagctgtttcataggctggagatgcactcttctagactgctcgagacagccagagacaggggaggagggaagaaggatactgtggaaagggatggcggggcaaacatttagagctagaagccactactgggccaatgctaaagtttctgtctctaagcctaaaaaagccagtgtagtagggcccttatcactcttagtttgctaggcttcccctctgaaataatgagcagatttagc

SEQ ID NO: 1137 - DNA, 357 bp, Homo sapien
accggcactgaacaagcatttacttaacatccaatccaggctgcatatgcacaaaatgatctgaccacatgcttatgcaaaataaagtttttcttagaaagccaaaattccaaccattctgactgtccgctgcctattcccctgttgagtattttgagcgaacttctatagaatataagaacaattggcatggcacttaaagactgcaaaaaacagaacacaattaaaaacatttataatgcatttctgtataaaatacacaccgtaaatcttattagttaaaaaaagatttaaaaacaaaagaccaccctgaataatggttaaaacctcatcatagaaaaatgctcatcattttgt

SEQ ID NO: 1138 - DNA, 207 bp, Homo sapien
gccggacggcgcgcgtgcgtgctggcgtgcgttcattttcagcctggtgtggggcttgtaaacatataacataaaaatggcttccaaaagagctctggtcatcctggctaaaggagcagaggaaatggagacggtcatccctgtagatgtcatgaggcgagctgggattaaggtcaccgttgcaggcctggctggaaaagacccagt

SEQ ID NO: 1139 - DNA, 605 bp, Homo sapien
  misc_feature (1)...(605): n = A,T,C or G
accacaaacacactcaacttgtctatgaattagagaacaagatactgctgctgcttctttttgtcttttgaaatatacaatgttttgtaggctctgcccttcaatgtgaaagcaggacattaaatttgaaattatttgacaattaaatgtttaggaccatctaacttcaactgcaaaactaaacagatctaccttgtccttccttcaaaccacctcacaaaaataagagaaaacaattcaaacatgattatttttttaaagtccttgaaagtattaaaactctcagagaaaaggaaaggaagaaagaaaaacaagaacaaggagggagaaaagctttaaaagaaaagtgttggggtgggggaggaatcaatgggcctctcttttatttggcgacaagcaagtgcaagaaagttcatttgtaatttgttcagttgtctgtcttttgcacatctgcattctgaccagaaggaactttgaggtttttctgcagcacatgagcatctgcgggctctatcctcttatagtagttcttctttgtctcaataatctcaaagccaaacttcctgtagaagtcaattgccgactcattgctgatctganatgca

SEQ ID NO: 1140 - DNA, 254 bp, Homo sapien
acattacttccagtaaatatttgaaaatatattgaagtaaacttgatttttttttttgtcacaagaaaatattaagagttattgttgcagttctgatgagctgcaggttttttgaactcacttctggaggtgcagagccacaaacgcactttcggggcctagttttgctcgaatatgaatttagataggtatcaagctgtaactaagacaatatttgataaatgttggatgacatttaatttaatggagcatgt

SEQ ID NO: 1141 - DNA, 298 bp, Homo sapien
acttcccatagtgagttacccttagtaaatactcagtaagttgaattgaatttaaattacctgtaagtcttaaaatgtgggattaaattaagaatatattgtcctggaaatacccaaatgtctattgatggatgaatggataaacaaaatgtggtatacacataatggaatattattcagccttaaaaaggaatgaaattctgacatgtgctacaatatgatgaacctggaagacattatatgtgaaataagccagacagaaaaggacaaatactatatgattccacttatatgaagt

SEQ ID NO: 1142 - DNA, 125 bp, Homo sapien
actgctttcaacttaaatcactgaggcatttttactactattctgttaaaatcaggattttagtgcttgccaccaccagatgagaagttaagcagcctttctgtggagagtgagaataattgtgt

SEQ ID NO: 1143 - DNA, 272 bp, Homo sapien
acccactgaggttcagtatcaagtttgttaattaacctaagcaattcctgataggctttatcaagatcggaattcacaattgccgtatcaaagtagtggccattgttctgctccatctctcttgtcttctcaatgatttctctcaactcttcaggctttggattcttgccttctttggccaataatgcccgaagtctttcttgtgaagggggtgcaatgaagataatatatggtttcaaatctgaattccggagagtcttcaatgactgtgt

SEQ ID NO: 1144 - DNA, 523 bp, Homo sapien
acaagctgaaggtggggtgtctaacaactaaaaactatcactaaatctcaaagagaaagttcttgcaaaatatgtaaagttcacaaggtgcagacattttccttctttaggcttttatctaaggaagggctatgaaactgggcccatctgtatacaggctcaaatttacgtttttaaaggaagaatctatgcagctgaggcttattgcaggaaatacttcatttgtatgtaaatattattgtaaataaataggaggctgtatatttttgaagttgttgatccgcactgaaatagaagtctctaggatctgcatataaacaataaatgtttcctagaaattagtggttttgtttgggaattagaaaaatttacattctctcccaggtaacatagttctctcaatgtaaacttggaacctgaaaccctacttaatttagagaaagaaatgtctgagaaatagttcccttgatttcttatgctggcattaagatcaattatttaacagatagtcctctgagataca

SEQ ID NO: 1145 - DNA, 474 bp, Homo sapien
acttatttcaacaattcttagagatgctagctagtgttgaagctaaaaatagctttatttatgctgaattgtgatttttttatgccaaaatttttttagttctaatcattgatgatagcttggaaataaataattatgccatggcatttgacagttcattattcctataagaattaaattgagtttagagagaatggtggtgttgagctgattattaacagttactgaaatcaaatatttatttgttacattattccatttgtattttaggtttccttttacattctttttatatgcattctgacattacatattttttaagactatggaaataatttaaagatttaagctctggtggatgattatctgctaagtaagtctgaaaatgtaatattttgataatactgtaatatacctgtcacacaaatgcttttctaatgttttaaccttgagtattgcagtttgctgctttgt

SEQ ID NO: 1146 - DNA, 329 bp, Homo sapien
acaacaccaacaatatcctggaccttgaaattctgtttacttcagtccattgtatcctttaaggcacctgtgctagcctagattttgtaataacactgatttatgagaatggacaaaagtggtagggaaattgttccctctccacttctgaaagtatgatgatgtattaaggatggaggagttattaaaaatgtctcttctgatgaggtaacaattagatgaaaccatgttaaagctgagatgaacacttagaaattcagggatattgggtctttagccttatgaatttgagctgcttatttaattggtgtaatttactacatattagt

SEQ ID NO: 1147 - DNA, 191 bp, Homo sapien
acttaccattttatctttactttaaaaacaatgccttttccaaaatataaaaaaaagacctatttttaaagaactatttaaagatggctttgaaaacaacacttttatttacaacaaatagatggtagtgcaacagcactcgtggatgtttacgataaataaaaatactagtattccggcatcctttgggt

SEQ ID NO: 1148 - DNA, 117 bp, Homo sapien
acgaggacattttgccccgcggcttgttggggtctcctttacccatgttgacagatccgcgtccacctggtgcgagcttttcctcagagtcccgcagagcggccggacccaacggag

SEQ ID NO: 1149 - DNA, 363 bp, Homo sapien
  misc_feature (1)...(363): n = A,T,C or G
acgtgccaagcatcctcgtgcgaccgcgagagcccggggagcgggggcttgccggccgtcgcactcatttacccggggacagggagaggctcttctgcgtgtagtggttgtgcagagcctcatgcatcacggagcatgagaagacgttcccctgctgccacctgctcttgtccacggtgagcttgctatagaggaagaaggagccgtcggagtccagcacgggaggcgtggtcttgtanntgttctccggctgcccattgctctcccactccacggcgatgtcgctgggatagaagcctttgaccaggcaggtcaggctgacctggttcttggtcatctcctcccgggatgggggcagggtgt

SEQ ID NO: 1150 - DNA, 353 bp, Homo sapien
cggctgttggtttctgctgggtgtaggtccttggctggtcgggcctccggtgttctgcttctccccgctgagctgctgcctggtgaagaggaagccatggcgctccgagtcaccaggaactcgaaaattaatgctgaaaataaggcgaagatcaacatggcaggcgcaaagcgcgttcctacggcccctgctgcaacctccaagcccggactgaggccaagaacagctcttggggacattggtaacaaagtcagtgaacaactgcaggccaaaatgcctatgaagaaggaagcaaaaccttcagctactggaaaagtcattgataaaaaactaccaaaacctcttgaaaaggt

SEQ ID NO: 1151 - DNA, 301 bp, Homo sapien
ccgaaaggaaagaaggccaagggaaagaaggtggctccggccccagctgtcgtgaagaagcaggaggctaagaaagtggtgaatcccctgtttgagaaaaggcctaagaattttggcattggacaggacatccagcccaaaagagacctcacccgctttgtgaaatggccccgctatatcaggttgcagcggcagagagccatcctctataagcggctgaaagtgcctcctgcgattaaccagttcacccaggccctggaccgccaaacagctactcagctgcttaagctggcccacaagt

SEQ ID NO: 1152 - DNA, 244 bp, Homo sapien
actgcaatcacaatgccagatggtgtttatgggctatttgtgtaagtaagtggtaagatgctatgaagtaagtgtgtttgttttcatcttatgaaaactcttgatgcatgtgcttttgtatggaataaattttggtgcaatatgatgtcattcaactttgcattgaattgaattttggttgtatttatatgtattatacctgtcacgcttctagttgcttcaaccattttataaccatttttgt

SEQ ID NO: 1153 - DNA, 504 bp, Homo sapien
caggtacaaaatgaaatagacagacttaatgaacaagccagtgaggagattttgaaagtagaacagaaatataacaaactccgccaaccattttttcagaagaggtcagaattgatcgccaaaatcccaaatttttgggtaacaacatttgtcaaccatccacaagtgtctgcactgcttggggaggaagatgaagaggcactgcattatttgaccagagttgaagtgacagaatttgaagatattaaatcaggttacagaatagatttttattttgatgaaaatccttactttgaaaataaagttctctccaaagaatttcatctgaatgagagtggtgatccatcttcgaagtccaccgaaatcaaatggaaatctggaaaggatttgacgaaacgttcgagtcaaacgcagaataaagccagcaggaagaggcagcatgaggaaccagagagcttctttacctggtttactgaccattctgatgcaggtgctgatgagtta

SEQ ID NO: 1154 - DNA, 496 bp, Homo sapien
actcatttacaataaaataaccaagtgaagttacaaaaggcatatattactgtgaaaagaacatacactccacattttgccgattaataatggcaatcataatttaacataataaaagaatatatatctattgcttttcatcatacttgataaatacagtatgaacaaaattttcattgtatacttttcacaagataataaataagttaaatagttttcatattgagttgtggtgcagtggtgcgaatcaactcaaagcagctaaaaattcagcagttattctccaacaattacaaagtaagctctgcgcaaggcttccagagggagcagacaaaatggttctaaactgaacatccactaagtggtggcaatgaaaccaagtaaccagtatggacctttggaatgcaagggttttttcacccccagacatatataattctgttaaaaaacaaaaaacacctatgggctgagggctaactatcaaggcatattcttg

SEQ ID NO: 1155 - DNA, 482 bp, Homo sapien
accatccctgggcgctgcttcatcacatgtcgtctctctctttctgcagcacaacaagattcgcagcgtggaggggagccagctgaaggcctacctttccttagaagtgttagatctgagtttgaacaacatcacggaagtgcggaacacctgctttccacacggaccgcctataaaggagctcaacctggcaggcaatcggattggcaccctggagttgggagcatttgatggtctgtcacggtcgctgctaactcttcgcctgagcaaaaacaggatcacccagcttcctgtaagagcattcaagctacccaggctgacacaactggacctcaatcggaacaggattcggctgatagagggcctcaccttccaggggctcaacagcttggaggtgctgaagcttcagcgaaacaacatcagcaaactgacagatgaggccttctggggactgtccaagatgcatgtgctgcacctggagt

SEQ ID NO: 1156 - DNA, 237 bp, Homo sapien
acaaggacccctgctttgccagtgcttggggtggtttccggggagcaggagtttcaattttcatgatttcatcacagcactgcttccattggccttgttgacagcaatagtaagcagcggctcttccccagtgtctgcatcctcaggttgccggtaacagaagaggtttgtgcctttcagaactccatgcacttgtgcccagttctgcatctccccagcttgctgcaccctgagggt

SEQ ID NO: 1157 - DNA, 534 bp, Homo sapien
acagctactatccagcccagtcaacaagcccagattgtcactcggtcagtgctgcttctatgcaactgcctccaccccgactacagccccctccattacaacagatgccacagcccccgactcagcagcaagttaccattctgcagcagcctcctccactccaggccatgcaacagcctccacctcagaaagttcgaatcaatttacagcaacagcctcctcctctgcagatcaagagtgtgcctctacccactttgaaaatgcagactaccttagtcccaccaactgtggaaagtagtcctgagcggcctatgaacaacagccctgaggcccatacagtggaggcaccttctcctgagactatctgtgagatgatcacagatgtagttcctgaggttgagtctccttctcagatggatgttgaattggtgagtgggtctcctgtggcactctcaccccagcctcgatgtgtgaggtctggttgtgagaaccctcccattgtgagtaaggactgggacaatgaatactgcagca

SEQ ID NO: 1158 - DNA, 342 bp, Homo sapien
acatcctctctcctctacagagcctcaatgtttaatacatacatgtgactttagtcataaaaccacatagtccaggaaaaaaggagccctttagaaaaaaaaaatcagtttagaatgactttcaaattgaccattccttttcaaatacttaaattcaaataacagatacattcagaggcccaaatgttggcatagaataaaatcatgttcatttattttttttctgcatcttagaattagaaggcataaaattaaatatgttgaatgtaataaattcatccatacaagtgcaagtctccagatataatgcattttatggcagatttattattttaaaaatgt

SEQ ID NO: 1159 - DNA, 367 bp, Homo sapien
  misc_feature (1)...(367): n = A,T,C or G
acacttttttggggatatgcttagtaatgctacgtgtgatttttctggaggttgataactttgcttgcagtagattttctttaaaagaatgggcagttacatgcatacttcaaaagtattttcctgtaaaaaaaaaagttatataggttttgtttgctatcttaattttggttgtattctttgatgttaacacattttgtataattgtatcgtatagctgtattgaatcatgtagtatcaaatattagatgtgatttaatagtgttaatcaatttaaacccattttagtcactttttttttccaaaaaaatactgccaagatgctgatgttcagtgtaaanttntttgcctgntcagtnacagaaag

SEQ ID NO: 1160 - DNA, 338 bp, Homo sapien
  misc_feature (1)...(338): n = A,T,C or G
acaagctttttttttttttttttttttttttttttttttaggaactaaaaaanaactttatttattgagggcaaggggatgcaaacaatacaaaaatcaaaagcttatctggtatttaacttttctttctctgcttgncaaatganagttanattttatttttacatttgctaagtgtcctgatctgctcatgaaatccttctatgggggaagctgtggggcanattccttaancgaccctttgggacaactnttatcagggaggagcgaactgctcatttctgcctacttcttttccctaattgngggcctcaccattgcatgcaatgactattttg

SEQ ID NO: 1161 - DNA, 316 bp, Homo sapien
gaagcagtgctgctacagaccccagcccaggcaggggaagagcccctgggtgtgggcagtgtggctgctggaggacgctatgatgggctagtgggcatgttcgaccccaaagggcgcaaggtgccatgtgtggggctcagcattggggtggagcggattttctccatcgtggaacagagactagaggctttggaggagaagatacggaccacggagacacaggtgcttgtggcatctgcacagaagaagctgctagaggaaagactaaagcttgtctcagaactgtgggatgctgggatcaaggctgagctgctgt

SEQ ID NO: 1162 - DNA, 320 bp, Homo sapien
acacatacagtggtaagtgtggtgcttgcctcaggtaggcagtcagatgaataactggatggtctccaaatacaccaagagctcaccctcttgcagtgctgtctgcctggaatgttcttttcctctttcactgccagattcctacttttccttcagggactaccttctctaggaagtccttaactcctgatctcccaccatggaggtctgtttcctgggatcccactgtccctgcacatccccatcacagcccagagaagccttaggcctgactcatctctgcccccagcatcacccagtatgggagaagggaggcttta

SEQ ID NO: 1163 - DNA, 246 bp, Homo sapien
actacatgatgaaattcttaataaacctatggaaacacttaaacttgctattccatcagggatctatactcttcagaataatttactgtatgtggcactatcaaatctagatgcagctacttatcaggtcacgtatcagttaaaaattcttacaacagcattattttctgtgtctatgcttagtaaaaaattgggtgtataccagtggctgtccctagtaattttgatgacaggagttgcttttgt

SEQ ID NO: 1164 - DNA, 330 bp, Homo sapien
acaaggggtccagaacttgcagaatttgcaaatacagaatactgctgcccaacaaataactttgacgcctgttcaaaccctcacacttggtcaagttgcggcaggtggagccttcacttcaactccagttagtctaagcactggtcagttgccaaatctacaaacagttacagtgaactctatagattctgttggtatacagctacatccaggagagaatgctgacagtcctgcagatattaggatcaaggaagaagaacctgatcctgaagagtggcagctcagtggtgattctaccttgaataccaatgacctaacacacttaagagt

SEQ ID NO: 1165 - DNA, 66 bp, Homo sapien
acctctccaggagcctttgccttaatgtatctctgcctggacaacttgtggtggggggtgggggga

SEQ ID NO: 1166 - DNA, 474 bp, Homo sapien
acaagtcataaacacagtgtgcagcagtgatgatccacaggggcgtgatgacagagcccccgcacaggtggtagccctggaactgaaggctggcctgccagggccactgcgagagcaaggacatgtttccacccacgatgcgtgagctgtagccccttctatgaccacaggctgtgcactgcaaggtaaccacgtggccagaggcacatccctccctcacatatactgagtggtgtaatgcagtcaccttgtcatctggcaagaggtgatcgatggacacaaactcctcccggaactgcccctccagcgagctcactctgaggttatctgaactcacatagcttgggaaacccagttgggcacaggcaacatttgcgtagtgacccttccagtcatcggagcacatggtcttccacgaagcagctgtgaacacctggagcacggcattctgaccacccacccggacacagcggt

SEQ ID NO: 1167 - DNA, 275 bp, Homo sapien
acagggtattaaacaaataccaaggggaacagttaacttcaatacaaggtcaaaatcagcaacaagttctacaatccagtgctgatatcagatacaagcttcaaggacaatttcttttcgaaggcttattccagtttcgtgaggctagcatgaggtgtgtgcatttgccaggggcaaatttctattctcaattaacccatgcaacaaatgctacgcatctgctgagtccgtttagaagcatttgcggtggacgatggaggggcccgactcgtcgt

SEQ ID NO: 1168 - DNA, 257 bp, Homo sapien; identical to SEQ ID NO: 1118

SEQ ID NO: 1169 - DNA, 239 bp, Homo sapien
  misc_feature (1)...(239): n = A,T,C or G
tttttttttttttttaacttaaatgcttttattgacaatgtcttggaacaataagcaaacaatgcttaaatttttcattcaaattcactttccacatgtcaaaagacctcaaggtagaaaaaaataaaataaaaatataaatatctgagaatccatcttaataaataaattaaaaacacaataaaacgttttcatggaaaactgttaatgtcagaacattcanaccacctcaacaatgc

SEQ ID NO: 1170 - DNA, 334 bp, Homo sapien
acacagttagtgggagcacactatataaatcctttgcatgacaccattcaacaatattttttaaaatctacaaaattttaaagtttcacttccctagcaaaatatcttcagtcaagaaattagtctttgaaaattatgaaaattgttgtgggaaatatttatacaaattattactgataatgcacatatattttgaaacattgtttctagaagcaataaaatataacctatttaggagataacccaaatgatttgtaaaaaaattaacttgtagaaaagggaaggatgttgtgtaaaatcaagtcaattatttgaggtttttataatattgagt

SEQ ID NO: 1171 - DNA, 278 bp, Homo sapien
acctgggattacaggtgcgtgccaccgtgcccggctcatttttgtattcttagtagagacggcatttcaccatgttggccaggctggtctcaaacccctggcctcaactgatccactctcattggccttccaaggtgctgggattacaggcgcgagccaccacaaccggctcagtaaatacattttttattatcaaaaaagagtagtgtatggttggcgtattctgtgtagaatgtattttattgatgtctcctatttttataatttctgagttaagt

SEQ ID NO: 1172 - DNA, 479 bp, Homo sapien
actgaaaaactgtaatttttcagctgaaaattttttaatctaactttgctagttatttttatattgcaatctatattaccaatttaggaagtgatttctgagtctcttacactgtaaaggtgcactttattttctttgtcttccccatcatgtatttattgtgtcttgataactgatattaatctaaattcaatgtgtttttatgtaaaaatttgtcagttgtttagaatatttcactttgtttttgaaacggagtgacaaggcagatttttggttagaggacgggagttgatcactatcattactttttctagtttacctgttttttatatttaaggctgctaagccatgttcagcattttaaatgtggtctatcctgacatacagtgtataacaacataactcctcggaacctcctatgtgtggtataattctactcttccaaggaacatgacttcaatactttcagtgattcaggt

SEQ ID NO: 1173 - DNA, 564 bp, Homo sapien
acaagtcatgatggtcatcaacagctaagtgaagttagtagcaaaagagagtgccctgcttccggccaaagtgaaccacgtaatggaggaaccaatgaggaaagcaactcatcggggaatacaaacacagacccaccagctgagggtaagattaaccaagatttattctgccatgtaatggttagcaaaatgaattcatttagcaaaataactactatctaagtttccaagaggaggaacagtcacacttgggacatattacaactttcagttctggttaatttataaatacatacatttaaaaagaggtagagagcgctgatcgtgaatgcatataatctgataaaaagtaattccttgcgatattttataaagaaaacgaagagaaagaaataataaaagtaaattaatatttacctcaaaatccttatgtgcagttatcctaccaaattgaagtggcaatcccatacttctcatgagttcagcctcagaatcaagttcattttcatccaggcctatgcctttgctgccatgtgattctgcagtacctcgccgcgacccgct

SEQ ID NO: 1174 - DNA, 468 bp, Homo sapien
acatcaaagattacatgaaatcaatcaaagggaaacttgaagaacagagaccagaaagagtaaaaccttttatgacaggggctgcagaacaaatcaagcacatccttgctaatttcaaaaactaccagttctttattggtgaaaacatgaatccagatggcatggttgctctattggactaccgtgaggatggtgtgaccccatatatgattttctttaaggatggtttagaaatggaaaaatgttaacaaatgtggcaattattttggatctatcacctgtcatcataactggcttctgcttgtcatccacacaacaccaggacttaagacaaatgggactgatgtcatcttgagctcttcatttattttgactgtgatttatttggagtggaggcattgtttttaagaaaaacatgtcatgtaggttgtctaaaaataaaatgcatttaaactcaaaaaaaaaaaa

SEQ ID NO: 1175 - DNA, 358 bp, Homo sapien
acttttaaaaatatgcaaaatcacaaatgggactgctaaattataatgcatattttagaatgagaaacatatcttttcttcctttaaagtgccatatagagaatgacatcttataacccagagccactttgtttaaaatccaatgtgaaaagactgttatggaatgaaaagtttgcacaactccttggagcagttaaagtccgctacatgcaacataggctacaaagcactcaagacttggtagcttttctgaaatttgagtccccctcccatatttaatggaaagtaacatttacagggtgcatttacatacactataatacaggaatgatgtccctttgccagaagataaaattgt

SEQ ID NO: 1176 - DNA, 391 bp, Homo sapien
acagctgtgtagtaaagatgccttctggtgaatttgcacgtatatgccgagatctcagccatattggagatgctgttgtaatttcctgtgcaaaagacggagtgaaattttctgcaagtggagaacttggaaatggaaacattaaattgtcacagacaagtaatgtcgataaagaggaggaagctgtaagtagtttttaagtaaaaagaaaatagtttgaagagaattataatactgcttattaggttaattgctaaaattaaaagtagacagaattggatcccaagtaatttctgaaaattgagatactgttgaaatctgcgaatgatttataagtgtcatccaatttagaattatatttgcaagaagggaatacaaattcagcacgtgt

SEQ ID NO: 1177 - DNA, 237 bp, Homo sapien
acagtttacagttgaagagcaaacagaaaggttttctcttggtgggatatgcagaacttgggatgtgtgtatatataaatatataatatatataaatatatataatactgacttaaaaaatcaaatcccccgacatacgttttttttaatctgtgccaaaaatgtgttttcagaggaaatcttattttcatattcagactttgtattgcccactcatttgtataagtgcgcttcggt

SEQ ID NO: 1178 - DNA, 564 bp, Homo sapien
  misc_feature (1)...(564): n = A,T,C or G
actatttctaagtaaccttctagaaaggttacaatagatgcatgctcaccagaactgtatgataatacctcattgtttcaccttaactatcaggtgatagtatattcagtcttcattattaaagcttagaggtggaacataatttatatctttttcatatccattttatatctaattaaatatgtgagttcatcacagctttgcagaagaccagatattccatttcaaaaaaagagtttggaagttggcttccactgttatggaaataattcaacttatcacccaaattttagtttattaatttccagtgctaatgtttactttggatatataatgtcaaattttgtttttctgtaagatttttaaaaagcataaaacagttactcttaattttggatggagtcatttccagtcccttctgaaataaggcagattatgaataagtaaatggaaactattgggccaattttaggatttctctgtaactaccctgcttgataaatttttatatccacttataggtcaagaatgtangtatcttttttctttctcagccatttatat

SEQ ID NO: 1179 - DNA, 421 bp, Homo sapien
acagaagaagtaggaaaatcctacccataccacagctcactaatggagtcataatacggagtcaccgatatctcagtttacagctttacaaataacccatggagaaacaaatactaaacttacttttttgatattaatgtgtgaaaatcttaactaaaacttcagacaatctcaatattctttgaagtatcttcccagtattagatattgaggaggcaggaatgagaaatactgctttgatgctttatctttttaccatattagtcatgatttaaattgatttttaacactaatcaccatttaaaaaattaaaaccacctacataaatatgggcaaatccaactacagcagaaacatttcttagcaaatatgattaaacattccaataaatttcatgagacatgactcacaaaaacaaagt

SEQ ID NO: 1180 - DNA, 385 bp, Homo sapien
acagtttaattattaaactgcaatctagctggatttttttagtatattcagaataactaatatggcagtgggtttgctattgatttagcacactgttcaaaaaacatattgaacaattataactttaagactccacccagtaataggtctaaagcccatagatgggaatcaagtaaaatttttaatttttaaagacacaggactaagctttattctttcttcttctatttttattaataacatattatcttgtttaaccagagttcaacctctgagctattgaataggctcttttataaaaaatagtatggggaagatgtatggaaatttccatttaatagcacaggttcaagataatccagctcactaagaaataaacataagt

SEQ ID NO: 1181 - DNA, 470 bp, Homo sapien
actctatgcattctatctatacagaaacacctatttattattacagttgatttatgcaggattaacatttttggtgttaaaattgttaaacatcatgcttactgcacatcaactctccataatgaatctgaacttcacaatgatttaccaaacactttacttaaattactaattaaataaatgaaaaatgcaccgagccaaacaaaacttaactgggctataaagaaaaaaacccttcaaaacagtccatatacacatctatttcaaaactacctttgctagctagcccctttcccaaagttttagcctgaaaaaacagtaaaatctacacaaaattttattgcaatcatacaagggttacattaggtcaacaaatactatgatgcaattttatatttattaaactacagttcaaagcacaaatttacacattctaaatacactaaacattatctaatgaagtcacactg

SEQ ID NO: 1182 - DNA, 406 bp, Homo sapien
acagcaattgtagtaactgacacatcctctctttgcaagctgctgactgggcacactcatgccaagtttcagaattattggtcttctgggtttttgctttttaaaagaggtgtgggagcagaggaatggaaacaatcgtgagtttttgagctagggaaagttggagctcctttaatctttttaaaggatcagtgctgccctaagtgaataaactcaattgtccatctttattttagagttttaatgaattcaaggaagggagcatagcatatctgtggcaaactattttccactcaaatcctgagttattgctgcatgctttaatttcttccctttcagcatctgagaaccttaaagccaatgtctgcgatctttttttggatatttatacttttagatatatagt

SEQ ID NO: 1183 - DNA, 537 bp, Homo sapien
acccatgctcacacacacacacttccagttttatacaaatttttttaaaggaaagaaaccaacccaaagtattgcatttgaggtgacactccctgaagaattttatacagaggtaatatactgtttagcacagctgaaggtttttttattctttctttttttaaagtgagcccatgatttggtgtctttcccagattatcccctttgcgacaacacaagcaaaaatatttacaaaggtaaggcatagtcaaactacataaagagaaaaaatcatgaggaaaatacatgaaaaagactaaagacttcgccataacaaggtcttagtgataatagtgtccgtaaagatgtcatcagaattggtaaagtcaagcatgctgcaaatataccctttggattagaaaagagcacaattttctttttttgttttgttctgttttaagaagtggcatactgctctttctccctttggataatttcttttaagcccatcaaaggaaaaaacaaacacaattcaaacaaacactgtcaagtgattca

SEQ ID NO: 1184 - DNA, 161 bp, Homo sapien
actaaagggcaaggttcaccactacaaaaaggaagttgtctaaaagcaagaattcaattaacgctgggtaagaaaagtcaaaacactaatgagttgtccatgaagccaactgctaagaacgcgctcaactatacgcgacatgaagacactacgcacgaagc

SEQ ID NO: 1185 - DNA, 351 bp, Homo sapien
  misc_feature (1)...(351): n = A,T,C or G
accaaatttaacttggcaaactttctattgcctgtcccatgtgcatcttatttaaaatttcccccatggaaatcactctcctgttgactatttccagagctctaggtgtttaggcagcgtgtggtgtctgagaggccatagcgccatcatgggctgatttttattaccaggtcccccannagcaggtgggaggctctgcttcctgctgccgctctgcagcctggacctgtggaccctggttgtaaagagtaaattgtatcttaggaaaccagtgtcaccttttttttcaccttttaattttatattatttgcgtcatacatttcctgtaacggaagtgttaattttactgt

SEQ ID NO: 1186 - DNA, 373 bp, Homo sapien
acacataaagtgcacacattacctatgctgaacaatgccaagaaacataatatattgatgcaacagttttctaaaataaacataaaaatgagcccagaccatcagacaaaagcaaaacacttatttccaaatagcacaatgctgaaaattgatagcaatcctaaaacacctccaactttccttaaaagctgccaaagtccaactattttttaaaaattgattttttttacattaataaaaatctggtgacaaacattataaaaccaaatgctggacagtctttactcctttaaaattccaaatattccaacataatcacaggagtaaaaaccattttaaagtgatatgctttatgaaacaaacaacaatatgt

SEQ ID NO: 1187 - DNA, 527 bp, Homo sapien
acttttttgtttacttgtgaaaatggccatctttaagcatatttattttctgccactttatttaaaggcaagcaatattttcttgatcataaatattttgtaatgaaatacttcctcttttccagggctttgtatgcacttgtataattacattgatggcaatgtagagtttgaatttcagtctgtaaatacttttttggaaaatagaaatttttattgctttaaagttttggatatgggtggttttcttttccgggtttggtggaaagtaatttgagaactttaaggttgtctttttaactgctggcaaaatgttgattttttaatattagataaaacgagtaaacgaaattccccagaaattagtagtaagtagggtctttgtgggttgggaagtagttttaatgtagaaagacatttacatataagtctgtttaatttcaaaggagtttgtgaaaaaaaatccatggtgaaaatgaaacaatgacatggttaatctggaacttacgttcttataccaataaaaa

SEQ ID NO: 1188 - DNA, 293 bp, Homo sapien
caaaagttatataaaagattagtttttactataaacccttgtcttttactcagatcctagcatcccttttcacatggtttctccatgtatataacagaatcaagaaacaaattttaattaaacaatctgtaacagaatcaagaaacaaatacattttaattaaacaatctatatggaacaaacattcccaaattctaagaataaatttttctttaagttttctctgagtttggcaattgttgttttttataatttaatctgtttaaatcatcaggtcttataaaatataatgt

SEQ ID NO: 1189 - DNA, 596 bp, Homo sapien
  misc_feature (1)...(596): n = A,T,C or G
acttagaaccagaatagcatactgtataatttagtggacttagttatttcaaaagatattattccacttccctgctaaatgaaattaatcatcacctttgactttcaagaggtgaaaatagcgtgtaataaagcatatcttttagtcatcaggcctactgtgaaaagcaaatacagactgtatatattatatactagctgttattttttgcttcaattgtattttatctcttttgttaaaaaaacatgatttcatcttgtaactgaactgcacatataatatcagagaaaatcttctaatggcatgacttgtaaaatctctaccccaacaaattagtttgatatctaggagttaccttatctgaaacataatgagttatgttctacagcgtctgcaatcaaactttaaacaatcaggtccctctttcagttagtatgttgttatactgaatacatgagtgttatggaaaagatttangtctcataaatgggtgaagaaattgtcaatctacanaaactaattcattccattaggatttcttgggtagcancanggntccaaattctgatnggcctttagtgatggaaaaataacaa

SEQ ID NO: 1190 - DNA, 122 bp, Homo sapien
acgcttgtgctttcatgattctctccatgttgccagaccatccgtgtacaagctttttttttttttttttttttttttttttcttttctttttttttttttttttttttttttttttttttt

SEQ ID NO: 1191 - DNA, 204 bp, Homo sapien
actgttttcattgttatttaattttgtgttttttaacttctttcatgatttccttttaactgaaggttttcttagatatttagtttgctggtatattcttttaaaattgtatcattgctttctttctatattggattattgtcagagaacatgatttgcatgatattaactttttggagtatattgttgcatctttgtggccta

SEQ ID NO: 1192 - DNA, 391 bp, Homo sapien
acaaagaaacagacctgctaatacttttcaaggacgattactttgccaaaaaaaatgaagaaagaaaacaaaataaagtggaagctaaattaagagctaaacaggagcaagaagcaaaacaaaagttagaagaagatgctgaaatgaaatctctagaagaaaagattggatgcttgctgaaattttcgggtgatttagatgatcagacctgtagagaagatttacacatacttttctcaaatcatggtgaaataaaatggatagacttcgtcagaggagcaaaagaggggataattctatttaaagaaaaagccaaggaagcattgggtaaagccaaagatgcaaataatggtaacctacaattaaggaacaaagaagtgacttgggaagt

SEQ ID NO: 1193 - DNA, 489 bp, Homo sapien
accaagtctaccattaaaccaagccagatgtcagtagccaggattacctgtgttcggggccagggacccaatgagggtatccccttcattgatgactacatctctacccaggagcaggtggtggattacttgactcaatactcgggtataaagcctggtgacctcgatgccaaaatttcctccaagcacctaacaactctcaagtctacctacttaaagcttcgttttctcattgacattggagtcaagtttgtgggtcatggcctgcagaaggacttccgggtcatcaacctgatggtttggcagggctcttttaagagtcttcttgtgagagtgggcccctcagggtatacattgtgcctttagagaatggggaattataggtcccctaccttaagtctccccttcttttatccttgccaggtgcccaaggaccaagtccttgacactgtctacctgttccatatgccccgaaaacgaatgatttcc

SEQ ID NO: 1194 - DNA, 255 bp, Homo sapien
acagaaaagctataaagataaatgtgacacattctttaccattaataataatatatattatctaaaatttaatttgagctaatatataactgacaatgaaatatttggaccacctaaaacaaggataaattattctgtgacaagtttatattcttgcattatgcaaaaatgattctaaaataaactattttttttcccagaaattgtatgagctatacattgctatgtaacaaattgccccaaatttagcggcgt

SEQ ID NO: 1195 - DNA, 262 bp, Homo sapien
acttaaaagaaagatttcccattgcatacaggttattggagaaattttccttttgttgcatttgtggaagttagttttctggcccgtggcctttaattttcttaatcaacctaattacatcaggatagaggtagagtttctgtaaaagaagagacattaagagttcctgaaatttatatctggcataccgataggcttatattcaaaacatcttagtcatacgaccataaattaaaagtggagtcactaaatagtttgcagt

SEQ ID NO: 1196 - DNA, 400 bp, Homo sapien
acattctgcacttgacatcacagagcgaactgagattagcagtcctatgttctacaattacttaatgcttagataacatttgtgcaacttgtggtagagctagatttctgtctttctatatgcacatgaggtccatagcctatataataaaactggcaaataatgcatattacatgtaaaattacaaatgcataattgacaatgtaataagcaagtagacaaatgccatgatacagaagagaattattaaataaagcactgacattgtttgatacagtgaaaaaaacactgcaattccacttttaaaatttgaagctatttacgtttatctactgatcaatatgatcagctgaatttaatggaaaaaaaatccaagaccagcagttcctcacatttgagt

SEQ ID NO: 1197 - DNA, 511 bp, Homo sapien
  misc_feature (1)...(511): n = A,T,C or G
tcacaatatcaagaagatttggacttttaagggtttcaccgaagtttgtgaccttaattagcttttacgttgntattcctacttttagcgaacaccacacagtttcaaaaatttagactatagtgtccgaacaggatgcagttaccatatgaagctttaactcaaaatttggataaagaaaaaaggcacaatgaacttcaactcaattttatgtgcacaagagttgaaaaatctgagccaccttaaagagaaattgattctaaaatttataaaacctataaataatcagaggccaaaccactatattaaaacagattctctagcaagtaaaaatcttgcagtttaaacatacgcttgtatccactttagatacaagacaaaactcactctttaaagtggctccaccttggcagatacatatatttgtaatgaatgcacacctgctatgtgttgtttatcagtgaaaacaccccagctgattcacaaagctctgatggcatctgtctcatct

SEQ ID NO: 1198 - DNA, 401 bp, Homo sapien
acagcagtgataagcgggtaggcaggactatgtctcaccatgcagcagctctcaagcgtcacactgctcagctccgcgaagagttgctgaaacttccctgccctgaaggcttggatcctgacactgacgatgccccagaggtgtgcagagccacaacaggtgctgaggagactctaatgcatgatcaggttaaacccagcagcagcaaagaactccccagtgacttccagttatgagctgcattgatgtggacttcatagacacaaaggcttcgaagcacaagccaaatatgtcaatatttgtatgtaagaaactaattatgtaataggtaatgaaactgaaactatactatgcccttaaggagatccagtttaattcaaggtgatcttttatttacctgt

SEQ ID NO: 1199 - DNA, 254 bp, Homo sapien
accttttccccccacagatgagaagtgtttgtaatggatttgtatttttcttaattttatgctctttagacgtttaaaagaaccaaaaaagaaacttttgcttcttcgttttcggttgggatttgcagtttaatggcctcagatccttctccagatccccagggtttctttgtcttatttatggagaaaaaccggtcactttgtccagcgcactgtgaggcccccactcaggccagccctggcccccccttggt

SEQ ID NO: 1200 - DNA, 393 bp, Homo sapien
accaaatgtcgaattctagactgaggagtagagttcattggagtcttaaactctctgatatcacttaaagctggagtttattttaaaacaaatgaagcatgggccacctcatgatgcagtggctcctctctggttgaggagagggaaaattggaaaaactggtcgagtaattatcaataattttttttaaaaagaggatcccaaactgtaaaagattgaaataatctttctcaggattttttaaatgtctaagattatgatgtcatatctcccacttaccttataagtaaaaaggttaatatcaagtaacttattagctcttaaagtaaaattgaacttattaaaagctatctatgatttaatagatttaataaaattccttcacgacctggt

SEQ ID NO: 1201 - DNA, 329 bp, Homo sapien
actcttgaaatggttatctttgtggatgatttttttttttaagctgaaacttacctcatgaataacttgattaaagtagtaggtgattaaaatttcaatagaatcaaatgagacaaaaattttaaactgactcatttgagtttcaactttacagtcattgaccataaagcacactaaaaatgtaagttatttttaaatacatctgaaataaaaatacttactaaaaaggaagaagccgaagatgtatatttagaccagcacacaattttgatttcaattagccttattctaatatttagcttttagatctttcatacacattttcacgt

SEQ ID NO: 1202 - DNA, 317 bp, Homo sapien
  misc_feature (1)...(317): n = A,T,C or G
actggaagatcattggtcagatgaatactgtgtctgacaaaaatgtaaactgtataaactgnggaacctcagctaatcagtattactttgtagatcaccatgcccaccacatttcaaacccaaactatctgtagatttcaaaatccattgtgtttgagtttgtttgcagttccctcagcttgctggtaattgtggtgttttgttttttgttttgttttcaatgcaaatgtgatgtaatattcttattttctttggatcaaagctggactggaaattgtatcgtgtaattatttttgngttcttaatgttatttgggt

SEQ ID NO: 1203 - DNA, 524 bp, Homo sapien
  misc_feature (1)...(524): n = A,T,C or G
aataaccatgagctgnntcatgctacttagcttttatgtaaatatttcttatgtctcctctattaagagtattnaaaatcatatttaaatatgaatctatncatgctaacattatttttcaaaacatacatggaaatttagcccanattgtctacatataaggtttttatttgaattgnaaaatatttaaaagtatgaataaaatatatttataggtatttatcaagagatgattattttgtgctacatacaggttggctaatgagctctagtgttaaactacctgattaatttcttataaagcagcataaccttggcttgattaaggaattctactttcaaaaattaatctgataatagnaacaaaggtatattatactttcattacnaatcaaattatatgaaattacttgtgtnaaaagggcttcnagaatatatccaaatttttaaatattttaatatatntcctatctgataacttaatttctttctaaaatttaccacttgccattaaggctatttca

SEQ ID NO: 1204 - DNA, 530 bp, Homo sapien
  misc_feature (1)...(530): n = A,T,C or G
acacaatggtttattaaaggaatgtatggcccacatcaacctagcaaggattctactggtaaaccttcccatggccaaaggaaaaacaagcaggagttgagtggctggggtggggtgcaggcaatggagagagggcagaagggtgtagaagctgaagggggctagaagcttactcctgagtttcttccttctgtcttcaaatctttacttcttatggccaaagacccagctgtttcataggctggagatgcactcttctagactgctcgagacagccagagacaggggaggagggaagaaggatactgtggaaagggatggcggggcaaacatttagagctagaagccactactgggccaatgctaaagtttctgtctctaagcctaaaaaagccagtgtagtagggcccttatcactcttagtttgctaggtttcccctctgaaataatgagcagatttagccaggctagcagaaaggaagaggacggggctgtgcangagtttagcagaatcttgattcttgctctat

SEQ ID NO: 1205 - DNA, 225 bp, Homo sapien
  misc_feature (1)...(225): n = A,T,C or G
ccatgggatttgangatngagaatgganatagaacttaaatgattctaaattctacataaaagtgcaataatagctacggtatccggaagctacagattcagtgtgtggtggaggacgacaaggtggggacagacttgctggaggaggagatcaccaagtttgaggagcacgtgcagagtgtcgatatcgcagctttcaacaagatctgaagcctgagtgtgtgt

SEQ ID NO: 1206 - DNA, 371 bp, Homo sapien
acaatcagtaaaatcaacacatcagtcttatattagaaagcatctctctcaagcataaaaacttgcagtaaacttggaagtatggaaagttctataactgaactttcacttctcccattccatactataactaccagtgacctggcccctacttcagcaatttttagaactgctgaacagagcaaaaatatcctttactagctgcaacatccaaacctcaaaaaaaggaattcctttggatgattccattcttaaaaactgaatgcacatctattttttttttaattttgtaaaaggctttctaaggctataagcagttaatctgaacaaaacaaaacaaaacaaaaatcacatataaaattcacccatgt

SEQ ID NO: 1207 - DNA, 464 bp, Homo sapien
acagatatttcatgtagaattaattgctagttatgatgcttgtggatagttaactgtttttttttagtcaaaatgatcatgctacgaaaagatgcttctgagagaatgtaatgagtaactgatttttcttcctgagtcgcccttgccaaatatgttactgtattaattaatctaatattgagtgattatttgtaaaattatgaatatgggaaatccatctatctacagcctaagttacacataagtttcagaaagtctgattagactaaagagatatttcttctgggacagccttcttcttggtaattttgaagttctttttacaagttccttcctcagtttcagttctttccagtgttttgtagctcactgtcactcactgaatagagaaacgtgtgccctatacttcctgtgacaatcattttgctgacagaatgatggatgtttaaaatattgcacaaagt

SEQ ID NO: 1208 - DNA, 516 bp, Homo sapien
  misc_feature (1)...(516): n = A,T,C or G
accgtttcccctgcctgttaataggctgattcctgcaggtttgagtaaaggaatcatctcttccttcagtgccgcattgttctttgtaagagatccgtgtcagttcaaagttgtgtaatttaaaggctagagaagaaagaagtttaaattggatcccacagtaaatattcacggatatttcaaagtagaattgtccactgtctggggttgggttcaagcatcaaggtgatcgcttcctgaacatgttcattgaccatgaggagctgtttactctggctcatattagactaccagtaattattttcagacatgatgtctcttttgaaagaaatgactttgctggactangataactgcaggggtagaagactggaaatacggngagtcagggtaggtggaaacanaaatgagtngnaangaaaaaaaaaagannttcctncaaggncatntatggtcagtaatnaaancaaaaattcatggtatgtgacttaaagactttctaagacattgtacctc

SEQ ID NO: 1209 - DNA, 470 bp, Homo sapien
acttctccatggagcagcctgaggcgatccctttattctgggcttctctcagaaatggattcccacacagtattcaaagcaaatttccccagaggaaatcctattggaagaacttaaaaactcagaatctttttctttgtccagagagttgaggaagcttaagctaaatgatacatgttttttaaaaaaaatcagattataaatttagtttttggtgattcattaaattctttactattatagttattttctagctgttcatcttttagctaaatttgttccaaagaagcaaaagtttggtttctactaagttctggattctggatgggagattgcactgtgtgtgacatgcaagtttcatggtgtgggagattgcagagcatttgggttactgcttttactctttggaagctgttatcatctgtatctgctttaaataaagtttaaagatttggaacaaaaaaaaaaaa

SEQ ID NO: 1210 - DNA, 520 bp, Homo sapien
  misc_feature (1)...(520): n = A,T,C or G
aggtactttggcctctctgggatagaagttattcagcaggcacacaacagaggcagttccagatttcaactgctcatcagatggcgggaagatgaagacagatggtgcagccacagttcgtttgatctccaccttggtccctccgccgaaagtgagggggagactatcatactgttgacagtaataggttccaatatcttcaggctgcagggtgctgatggtgagactaaaatctgtcccagatccacttccactgaaccttgatgggacccctgtttgcaaattggatgcatcgtagatcaggagcttgggggctgtccctggtttctggtgataccaatttaaatagttgctaatgtcgtgactcgcctggcaagtgatggtgactctgtctcctatagatgcagacagggaggatggagactgggtcatctggatgtcacatctggcacctgagagccagancagcaggagccccaggagctgagcanggaccctcatgtncatgctgtgtcacctc

SEQ ID NO: 1211 - DNA, 450 bp, Homo sapien
  misc_feature (1)...(450): n = A,T,C or G
acaaattgctatttgctgtggggttatcagttggcctactttccaaaaccacgaccctgtcagatccaagcagcctgaaaattcttgtgctatctgaaatttcttgtgttacctcattagatctaaaactnntaccttgcattccatgtttccagaaagctagcacactgtcttgtaggcacactattgattcaatctggaaatcaaaggtgagttctgatgacaatttcctgctagattttaatcttccttggagatttactatttttatacaacagtccaagcatacaaggatggtatctctctccagttgggttacatgagtaacatttgtctgtggggtatctgattctgtaaaccatgaagaggtagaatttggattgaccgtctcaaatcgaaccacttggttgaagtctctacctctactgacaccaacacaaactaaagggt

SEQ ID NO: 1212 - DNA, 159 bp, Homo sapien
ctcgcccagctcgcccagcgtccgccgcgcctcggccaaggcttcaacggaccacaccaaaataccatctcaaatggaacacgccatggaaaccatgatgtttacatttcacaaattcgctggggataaaggctacttaacaaaggaggacctgagagt

SEQ ID NO: 1213 - DNA, 103 bp, Homo sapien
ttcaatgaatggaatcccgtaactcttggccagttcgtgggcttgttttgtatcaactgtccttgttggcaaatcacacttgtttcccactagcaccataggt

SEQ ID NO: 1214 - DNA, 130 bp, Homo sapien
acatattgaccaatggcctctgaaaaagcacattttagatactgaaattgaaggaaagaaaatgcatcttcaaacattttttggaatctcaccacatatactttgttagatttgtgtattgtagggtgtt

SEQ ID NO: 1215 - DNA, 259 bp, Homo sapien
actgctgcttatccaaaatatacaagacaattgatgttttatataaaaccactttataagttcatttgttcccaaaaacctttttttcttttttggccttgttaaaaaaaaatgttgttacaaatatttacagcattttcttctgttagacgaacattcttaaaaactgaaaaggggaattttgatgaacagaccacgtaaaacaccagacaatgtcagaggctcctagctgtgctattttttttttcttagatacagt

SEQ ID NO: 1216 - DNA, 196 bp, Homo sapien
acctgtcttatggaagaaatatgcaggtatataagaccacgattttctaaagtgcatattagaatttttgtttttgtaaatggttaaatacatttcctgggtaacttaggaaattaagtttttcataaggcaacagatggttaaactgattgtcatgaatacccaaagatcatgtatataatcgaagtgtattagt

SEQ ID NO: 1217 - DNA, 480 bp, Homo sapien
actattatctatgacttcatacagttactaattcaaatataaaagacaccacacttcgaaagaaaaaaattttaaggtaatggttttaattgaattaatgagatgaaaagatagtaaagccctgtttgctacttacatgaaagaagactttaaaaaataatcactgcacaaaatgtaaagggtggggttatgctgtgatattaattttcctcaataatgtttttcttgactgttcaagaacaaattaaagtttccacggcaaatttgttttcaaaatgccgaattgcgaaacaattgctggcttcacgtttctgaatacctttaatagtttctctgcgttgcagtttgtaagtttccttgtcatgacacagtcgataaataaagaaacccaggtgatcaatgttttcaatgcgatcagtaataaccatgtgctcatgaatcagataggactgaggcaaataggttccagccttgatgttc

SEQ ID NO: 1218 - DNA, 485 bp, Homo sapien
actgtaggattacagatggcatcacattgactgaaacattggagcaaggggaaaatggttaaaaactttgatttttgggaaatgaagggtgggaaaaatatacacagaggtctgggaaggatatttcaggcaaaacacaaaaacacaaaacacaaaaacaatcctgttcaaggattgaagaataattcagactgagtcacaattctcataaagtaagaaatttcatcaaattctatgtagctttaaaatggcttcaggtgtttttcagatttagctacttaattttatttttttacttttttatttttttacattctaacatttaaaatccaactacagaaaaatttttaactgaaagatgccttaatagaatgatctatatcccttagagaaaagattaggacagtcctttatccccttgaattactttttaaatttttaattttctgattttaattgcaataactgattatcatatatcagta

SEQ ID NO: 1219 - DNA, 257 bp, Homo sapien
accgagagccctctgcctcatagtccggtcgtaggcatcagacatggcagggaaacgatctccaaacctttcatcattgggccctctgagagggttctgaccactgaaaccaggtaggttgatatggtcacggatcagcatgatatctccaacctcaaacttggggttcagccctcctgctgcattggtgactaccagggtgtccacacccagaaggtggaaaaccctcactgggaatgtcaccttccagagtgggt

SEQ ID NO: 1220 - DNA, 191 bp, Homo sapien
actataagtagttggtttgtatgagatggttaaaaaggccaaagataaaaggtttctttttttttccttttttgtctatgaagttgctgtttattttttttggcctgtttgatgtatgtgtgaaacaatgttgtccaacaataaacaggaattttattttgctgagttgttctaacaaaaaaaaaaaaaaa

SEQ ID NO: 1221 - DNA, 419 bp, Homo sapien
acgttagactcagatggaaaagtattctaggtgccagtgttaggatgtcagttttacaaaataatgaggcaattagctatgtgattgagagttattgtttggggatgtgtgttgtggttttgcttttttttagactgtattaataaacatacaacacaagctggccttgtgttgctggttcctattcagtatttcctggggattgtttgctttttaagtaaaacacttctgacccatagctcagtatgtctgaattccagaggtcacatcagcatctttctgctttgaaaactctcacagctgtggctgcttcacttagatgcagtgagacacatagttggtgttccgattttcacatccttccatgtatttatcttgaagagataagcacagaagagaaggtgctcactaacagaggt

SEQ ID NO: 1222 - DNA, 375 bp, Homo sapien
accttggccaagcttaaagagaagattttctcagggtatttattagtgtgtccagcagggtcaggaagcaggatggaaagatgcattcagactgttaatttattaacaaggcaaatgattttgtgtttcttgatgacagactattaagtttgggacttattttcccatttgagaagttataatatatatttaagatgataagtttcctgcttaagttgtgcctttcagcttcaatgagtttaaggagcactaagggtaatgataccaatgagggttggtttattatcaaacctgaatagctgtggtttctccagtaaatattttcttctactgaacatggagccattattaagagttgtgtgttttttattatgt

SEQ ID NO: 1223 - DNA, 273 bp, Homo sapien
acatttcaggttaatagagaactacattttgggtttttagaaaggcagcaataattatattttggcttttagtctagatgcttaacatagttaaggcgacagttcaagcatattaagtgaaggtagttaaaatttaagaatcatcacaatctcttgaaacctacatacactgtttaatgcttacatggaatgaaaccagtgttcttaattggcattttacacacacacacacagaatttaaaaaaaaaaatcaaaggcaatcattctaaatgt

SEQ ID NO: 1224 - DNA, 530 bp, Homo sapien
accatggagaaggagtcgaaaaccacccgattctgtcttatctgtaactatgtcagtcgaataattgaacccctgacctctagatgttcaaaattccgcttcaagcctctgtcagataaaattcaacagcagcgattactagacattgccaagaaggaaaatgtcaaaattagtgatgagggaatagcttatcttgttaaagtgtcagaaggagacttaagaaaagccattacatttcttcaaagcgctactcgattaacaggtggaaaggagatcacagagaaagtgattacagacattgctggggtaataccagctgagaaaattgatggagtatttgctgcctgtcagagtggctcttttgacaaactagaagctgtggtcaaggtaaagtcagcttactaactttggggaaaggaatattaagtcatcataccaaaagttttttttattataggatttaatagatgagggtcatgcagcaactcagctcgtcaatcaactccatgatgtggttgtagaaaataact

SEQ ID NO: 1225 - DNA, 91 bp, Homo sapien
acttgtggaagatggccacgaggaggccaatggcctgatccagggggcatgccatggctgagggctgggcttggagcggtagggaggcggt

SEQ ID NO: 1226 - DNA, 254 bp, Homo sapien
attaggaggaggaccttagggagaccaagaggagagaagcatttcttttgatgaagtcacatcctgtctatgagcccactaatgctgtaacattggcctgaaagagagtgttctttaaaagcctttctcggctgttagtataaaaacatgatggtatcagctcttagcatgtttgcttgacccttatggaaggtataaatccacagaacttccttcccagagaactgggaaattgtcctagaaataaaccttgt

SEQ ID NO: 1227 - DNA, 390 bp, Homo sapien
atttaaaggaggtgactaaatttttggcactggtctgcattctaagggaagaaagctttgaaagaaaaggtttaatagactacaacttccactgtttccgaaaagctattcatgaggtttttgaggtgggtgtgacttctcacaggagctgtggtcaccagactagtgcctccagtctgaaagcgctgacacacaatggcacgccacgaaacgccatctagtctgaatcccagcgtcggggctctgtgccagcttactcttcactccagggtcggatgccacgtgctacaggacatgggagctgctgcttgtgggaatctggtgcctgttccactagagacaaggggtagagtttctcatttggatgaaaaccccttcaactggtggtgt

SEQ ID NO: 1228 - DNA, 363 bp, Homo sapien
actagaaccataaagttctatctgatggtaaattatgtataaaactaagataaaacagataattatgctctatctcatatctactgaaagtagaaaaggaggaagagtgacacttttaaatcaaactgctctagttttagcttaatggatggttaataaacacactgctttacgctgaagtgatcagatagctatttctacagttcagaagaacttaaaaatcaggttttaaagacaaaagaaagcagactcaaaacacagacaaagcagagaagaaaacaatgcccatgagatggtcactatttagacagtattataaaaagctaaagaacacttgggctttacttcactttgatgtcttgt

SEQ ID NO: 1229 - DNA, 384 bp, Homo sapien
acaacagaataatgcatgatgaactcacctaattatgaggtgggaggagcgaaatctaaatttcttttgctatagttatacatcaatttaaaaagcaaaaaaaggggggggcaatctctctctgtgtctttctctctctctccctctccctctctcttttcattgtgtatcagtttccatgaaagacctgaataccacttacctcaaattaagcatatgtgttacttcaagtaatacgttttgacataagatggttgaccaaggtgcttttcttcggcttgagttcaccatctcttcattcaaactgcacttttagccagagatgcaatatatccccactactcaatactacctctgaatgttacaatgaatttacagtctagt

SEQ ID NO: 1230 - DNA, 162 bp, Homo sapien
accgctcggccatctacccgacctctgccaagcaaatggaggcagccctgagctccaaagagaactaccaaaaggttctttcagagcacggcttcggccccatcactaccgacatccgggagggacagactttctactatgcggaagactaccaccagcagt

SEQ ID NO: 1231 - DNA, 551 bp, Homo sapien
  misc_feature (1)...(551): n = A,T,C or G
acacttgaaaccaaatttctaaaacttgtttttcttaaaaaatagttgttgtaacattaaaccataacctaatcagtgtgttcactatgcttccacactagccagtcttctcacacttcttctggtttcaagtctcaaggcctgacagacagaagggcttggagattttttttctttacaattcagtcttcagcaacttgagagctttcttcatgttgtcaagcaacagagctgtatctgcaggttcgtaagcatagagacgatttgaatatcttccagtgatatcggctctaactgtcagagatgggtcaacaaacataatcctggggacatactggccatcaggagaaaggtgtttgtcagttgtttcataaaccagattgaggaggacaaactgctctgccaatttctggatttctttattttcagcaaacactttctttaaagcttgactgtgtgggcactcatccaagtgatgaataatcatcaagggtttgntgcttgncttggatttatatagagcttcttcatatgtctgagtccagatgagt

SEQ ID NO: 1232 - DNA, 145 bp, Homo sapien
actgccgctgctcgtcaggaggccgcttgaggatgccctcgacgatgcgcttcagttcgaacaccgtgctggactccttggcgtccgtgaagatggtggtcttgtggcgccggatcatgaggaacacgtccatcgcggctgctgc

SEQ ID NO: 1233 - DNA, 523 bp, Homo sapien
acccaagcaaagaaacagcccactggaagcctccaccttggaatgatgtggaccctccaaaggacacaattgtgaagaacattaccctgaactttgggccccaacacccagcagcgcatggtgtcctgcgactagtgatggaattgagtggggagatggtgcggaagtgtgatcctcacatcgggctcctgcaccgaggcactgagaagctcattgaatacaagacctatcttcaggcccttccatactttgaccggctagactatgtgtccatgatgtgtaacgaacaggcctattctctagctgtggagaagttgctaaacatccggcctcctcctcgggcacagtggatccgagtgctgtttggagaaatcacacgtttgttgaaccacatcatggctgtgaccacacatgccctggaccttggggccatgacccctttcttctggctgtttgaagaaagggagaagatgtttgagttctacgagcgagtgtctggagcccgaatgcatgctgcttatat

SEQ ID NO: 1234 - DNA, 336 bp, Homo sapien
  misc_feature (1)...(336): n = A,T,C or G
actcaatattctnaaaacctcaaataattgacttgattttacacaacatccttcccttttctacaagttaatttttttacaaatcatttgggttatctcctaaataggttatattttattgcttctagaaacaatgtttcaaaatatatgtgcattatcagtaataatttgtataaatatttcccacaacaattttcataattttcaaagactaatttcttgactgaagatattttgctagggaagtgaaactttaaaattttgtagattttaaaaaatattgttgaatggtgttcatgcaaaggattttatatagtgtgctcccactaactgtgt

SEQ ID NO: 1235 - DNA, 434 bp, Homo sapien
accaccagatacttaaagcttcaaaaagactgcccctaccaccacaggaggaccagcctaaccatacgctccaaaagatggctgtgatagatcttgtgaagcaattactgagcagatcaagatctttgggaaggaacactaaagatgttttgaatgaattatagtccactggcattttagtgtattttttttctttttagaaacacacatttctaaaaatgtcatgttacattcctgcatgtcccttttgatagcattagtggatccattggatttcttttttctttttgtgagacagcttttagtcctacctgaatttatgtgtgtttttccgacagtggttaataattatattggtgatgtagcagcaattgtgttggcagggttttcatatattattagtaattaacactaactgttggactgacttgtgt

SEQ ID NO: 1236 - DNA, 519 bp, Homo sapien
acaaaacaggaagagatcaggctcttgtcacccactcctaaccctctgcagatttcctccgggatgctccgagatgggctggacctctgggaggttcccagagggtcggaagggaggtcctgctctgatccggggccagtttcgtcaggaagagggcggggctcaggatgctcataggctgggggcggagttttgtgtcccagactcgggatacgaaggagaggaaactaggatttccaaattctggagcaggactgaagttatttggggcagggagcttggattcgcaagatatggaattctgaagtgcggaaatatactcctagggactgagtggtcctaggctcccgggctggaggtgggacctgtgctccttgggttaagggtgaaacctcagctcctacaagctgggaggagccctgagtaacgttggtctggctctaggtgagcggttccgaggaggagcttgggtttctaggggctgggcctttaaagactggtaattaggacccagcgtga

SEQ ID NO: 1237 - DNA, 242 bp, Homo sapien
actatgtaaattatttttgcaacttctttaacgatatcacggcaggtcatttctttcatctgaagcttctctatttccgtctttgcagcttgcctggctttgccgatggcacagccccaataaccgtatgaaacacctgatgggtcaatcatgtagagttgcgcaccgtcattcacactgtaagaccctaacatgaaactgcagccaaaaggtctaacagcactgtagagtgtatatgcatg

SEQ ID NO: 1238 - DNA, 385 bp, Homo sapien
acatatattaaatggctatagcataaacattgttctatgggattttatagaagaaaaatcaagtggggagaattacttatgaaacattaacaaaaacccgtgatattgaagaacaagatgttctcatattcatttgatttcatctacttatttttggtgtcattttattgatgctggcccagactttccatttcccgtaattattaggtcagaaaaatgaaagcagcgggagggaacgcggtaaggcacctgtgggagacgggagcgctcctccgcaggggtgagacggtggctgccagtgttgagttcgagctgacggtgtgccaaggtcctgttttgctttatgccgttaagtgaagcgctggaagtgctggtgctcagaaac

SEQ ID NO: 1239 - DNA, 256 bp, Homo sapien
ctgaagtggcagcagcatcagggattgcttcctcctggtatgaccatagatttgtttcgaggcaaggcagctgtcaaagatgtggaagaagaaaagtttcctacacaactgagcaggcatattaagtttggtcagaaatcacatgtggagtgtgctcgattttctccagatggtcagtatttggtcactgggtctgttgatggattcattgaagtatggaactttactactggaaaaatcagaaaggatcttaagt

SEQ ID NO: 1240 - DNA, 413 bp, Homo sapien
  misc_feature (1)...(413): n = A,T,C or G
acctgaagtgtancgaaaatgctactatgactcttcctggaatacacccacctaccttgaaccagattatggattggatatgtctacttctggatgcaaattttactgttgttgtaatgatgccagaagcaaagaggctactgataaatctttacaagcttgtaaaatctcagatatctgtttattctgagctcaacaagattgaagtaagttttcgggagctacagaaattaaatcaagaaaagaataatagaggattatattcaattgaagtgctggagctcttctgatattatcaattctccttcatagacattttataaagctcttttatgtgaactcttgcttcatccaggcaagaacggtgttttgtttgcgaccatctcagtgtcaagagaaacgtgtcagtgagt

SEQ ID NO: 1241 - DNA, 535 bp, Homo sapien
accactaatcgggccaatatggcttgtgagcaaaatgggtgaaaatagagggaactgactgggacctgttgtctaacatcattttaaggttgaacttgagcaaagacttagagaaagctgatggaatgccaagcatcaacgtgaagagaccctctatgcacacagtggatatgttatgcctggctgtagccaccttctcttctgaaaacaagatgggaatgacggaactgtattaaaagattaagttatccactagggagcatactagcacacttccagatcagccttgagatgctagacttcagatacagggacttgtgtcaggtggcctctagaaatgtggaagactaagatttagaaataaactaatttaaaagcaaacaaacaaaaaaaactttcgcctaggatgatctgtttacaacagaaacaaaaacattttccagtttaatccatttgactgaaagtcattgttgggctgacccttaaggaaaacttaagtttaaacttcctttgcatagtatgttttctctttttt

SEQ ID NO: 1242 - DNA, 205 bp, Homo sapien
acaacgttaaattgtccgatttatgtgtattacttaaagctataaattgaactagatcttgccgtgctctgtattgagtataatttgtatacttttttataattaatgactaaatgatcactttggaggcagggtggtgggggtgtattagcagccaaataagcacatctgatcaaaaagaaccaggcttagattttttttaagt

SEQ ID NO: 1243 - DNA, 125 bp, Homo sapien
tttttttttttttttttggttgacaatgagaatatttattgagggtttattgagtgcagggagaagggcttgatgccttggggtgggaggagagacccctcccctgggatcctgcagctctagtc

SEQ ID NO: 1244 - DNA, 356 bp, Homo sapien
acatgaaactccagcagatttaatattggcatccatcatctagtcaaacctctcacatgttcttcaaatcaatcaaatttgggattctcaacattttctgtgtcaataaaaggtgtggaattagtagattcgatgaagacctgtttttccttgccacattggacttccagacgccatttggattgggtttagaagatggggaaatttagaagacgtttcttggcctgagtctcttaagagtagagatgcagaagagagagtgagaccacgaagagactggctgttgactgcagggcaccaccagccgccttggtggtggcattagttggatttggggccaacccagagttggaagt

SEQ ID NO: 1245 - DNA, 536 bp, Homo sapien
actatctcaatagctgtatagctaacttatgtaaatcatatttatgctaattgaagagaatatatttcaccttcaggatattgtattcattttttctagccttaataaacattttataaatactgacactggggataaagttactgataatattatatttactttggcttcgcagagtaaaaattgttattcagtcacatacaacattctcgcatttttttagtcaatcctcaaactacctgagatgtaaccattattactcagttataaaaagaaaccaagattcaggtatactaaataatttgtgagtattcatgacagaacatggcaggtttgattgcaactctgtttgattccaaagtgtttgctctttccacttcatcgtaatgtatttccactttatcataatgtatttctggcaagaagcataagaatcaaaaacgtgacctgaaaaactactatggaattatttttaagtggtttgcatagactttgtttttagactttgtttaacttttcccaaaaagttgtacctc

SEQ ID NO: 1246 - DNA, 531 bp, Homo sapien
accatttttagacttctgtctttatataatttagtttgtaaaacctagtttcatgtttaatgaattaagaaacaacatcagaacagtttagccagattttaataggcaaaaaagggttgctttggcaatggataaaagaataactgttataatacaaatctttatttaatctactttattaaatattaaaatgcaataaggcaattattgtttttaagacacttgaaattgcatttaataaatggataactggccccacacctgacatattgcacccctacttttcttctctactctaaggaaccaaaaaaattattttaaaaaacaaatcagtggtctttctaaaaacatctcaaagaggttctgactactactaaggtatttattaaatacaaatatctgaaaaataagacagccaataatatcttttaaggtatttctgctgtcttttgttctcttaaatctactcagaatggttcaactgaaagtatcccaactgaggaataaataggtgtaatttattgcttaatt

SEQ ID NO: 1247 - DNA, 498 bp, Homo sapien
ggcccagcagccaccacagcgcctgcttcctcggccctgaaatcatgcccctaggtctcctgtggctgggcctagccctgttgggggctctgcatgcccaggcccaggactccacctcagacctgatcccagccccacctctgagcaaggtccctctgcagcagaacttccaggacaaccaattccaggggaagtggtatgtggtaggcctggcagggaatgcaattctcagagaagacaaagacccgcaaaagatgtatgccaccatctatgagctgaaagaagacaagagctacaatgtcacctccgtcctgtttaggaaaaagaagtgtgactactggatcaggacttttgttccaggttgccagcccggcgagttcacgctgggcaacattaagagttaccctggattaacgagttacctcgtccgagtggtgagcaccaactacaaccagcatgctatggtgtccttcaagaaagtttctcaaaacagggagt

SEQ ID NO: 1248 - DNA, 368 bp, Homo sapien
acggagggtcaactggagggccaacttttctacatatgggttctgcaagactttctgtgggacttgagtatgggcagattttggtatatgtgtggccctggaaccagtccctagcgtatacaagggatgactgtattttaatggtttatagtgttaaaaagagaaaaatatccacataaacacaattttgaacactgaactattttaatatgaattaatgtcttatgtttattaccaattgatcttcaaattgcagcagcccatgagtttggttgtaagtgttcttgccattccaccccagctgtcactgagtcagtttaaaatacacacacacacacacacacacacacacagacacaagccttttg

SEQ ID NO: 1249 - DNA, 86 bp, Homo sapien
acaacaatatgaagtccacacatctgagcaagacggaattctttcccatctacacaggcgaagcagacctctttccatgttcgagt

SEQ ID NO: 1250 - DNA, 365 bp, Homo sapien
acccggcctcaaacaggttttttaatgcagacataagtgccctattggggtgggggagccaaaaaagacattagtaaggaagaggagcaaacaccagaattcatttatttatttctgtttgcttggacacaggttctcacttttttgtccaggctggagtgcaatggcgtgaacatggctcactgcagcctcaatctcccaggctcaagtgaacctctcacctcagccttccaagtagctgggaccacaagtgaacaccaccacacccggctaatttttgtggtttttttgtagagacagggttttctcatgttgcccaggctggtctcaattcaggcctcaagcgatccgcgtgggcaacatgg

SEQ ID NO: 1251 - DNA, 296 bp, Homo sapien
acatgtgaaaatgatgccagaattccagaaaagttcagttcgaatcaagaaccctacaagagtagaagaaattatctgtggtcttatcaaaggaggagctgccaaacttcagataataacggactttgatatgacactcagtagattttcatataaagggaaaagatgcccaacatgtcataatatcattgacaactgtaagctggttacagatgaatgtagaaaaaagttattgcaactaaaggaaaaatactacgctattgaagttgatcctgttcttactgtagaagagaagt

SEQ ID NO: 1252 - DNA, 167 bp, Homo sapien
  misc_feature (1)...(167): n = A,T,C or G
acaagcttttttttttttttttttttttttttttttgagatggagttcactctattgcccaggctggagtgcagtggcncaatctcggctcattgcaagctccgcctcccaggttcacgccattctcctgcctcagcctcctgagtagctgggaccacaggcgtccg

SEQ ID NO: 1253 - DNA, 222 bp, Homo sapien
acgtgtcagcattatttaaatcaataatgcatttcacaattattgcagaaacatcactgagacatcgtaaattgtcaaactgacttgtaatccagttagatacaatttatacagaaatctatttggaattatacctaattactttttactaagaaacttcaaataattttacttcctgaagttccagattacagttgtatacacacatgcatgcatgtgtgt

SEQ ID NO: 1254 - DNA, 587 bp, Homo sapien
  misc_feature (1)...(587): n = A,T,C or G
actggctgangattctatctcagctgtcttttctaactgtgtaggttgagttttgaacacgtgcttgtggacatcaggcctcctgccagcagttcttgaagcttctttttcattcctgctactctacctgtatttctcagttgcagcactgagtggtcaaaatacatttctgggccacctcagggaacccatgcatctgcctggcatttangcagcagagcccctgaccgtcccccacagggctctgcctcacgtcctcatctcatttggctgtgtaaagaaatgggaaaagggaaaaggagagagcaattgaggcagttgaccatattcagttttatttatttatttttaatttgtttttttctccaagtccaccagtctctgaaattagaacagtaggcggtatgagataatcaggcctaatcatgttgtgattctcttttcttagtggagtggaatgttctatccccacaagaaggattatatcttatagacttgtcttgttcagattctgtatttacccatttttattgaaacatatactaagttccatgtatttttgttacaaatcttctgaaaaaaaacaa

SEQ ID NO: 1255 - DNA, 300 bp, Homo sapien
  misc_feature (1)...(300): n = A,T,C or G
cttttttttttttttttttttttttttttttctttaagctcctttcttacncagggaatgagggggagctatgttctttcttcactcagcagtaactgaaaaatatgtccttaacatttcaaaaaagcanatcgtccctgtgctataaccactaaagcgtggaggtgaaatggcatgggtgtcctttatgtcaccatntgtcnacgttaatcaatnnaagcatggataanccaaactcgnggtttctttggagagcataaatntgataatacanaaacattccanagtctaaaaatttcc

SEQ ID NO: 1256 - DNA, 142 bp, Homo sapien
accaggtctgtgcagctgatatgaatgtcttgaagagtcatgtggaacaacttgtccaaaatcaattcatatgaaagctttcagagtaaatttttttttctagctataagcatgcaataataaatctcaaacactgatttgg

SEQ ID NO: 1257 - DNA, 231 bp, Homo sapien
actaaatggtggtctaggagcagctgggcggatagcaccgggcatattttggaatggatgaggtctggcaccctgagcagtccagcgaggacttggtcttagttgagcaatttggctaggaggatagtatgcagcacggttctgagtctgtgggatagctgccatgaagtaacctgaaggaggtgctggctggtaggggttgattacagggttgggaacagctcgtacctg

SEQ ID NO: 1258 - DNA, 533 bp, Homo sapien
acacagattcccctttcagcagtcaacttgcctttcttttttttcttttctttttctttcttttgagacagagtcttgctctgttgcccaggctggcgtgcagtggcatgatctcagctcactgcaacctccgcctcccaggttcaagtgattctcctgcctcagcctcccaagcagctgggactacaggcacgtgccaccacgcctggccaatttttttgtactttcagtagagacggggttgcttttctattcccaagtccaaaagcctatgaagagggccagcgcaatggctcatacctgtaatcctagcactttgggtggccaagacaggaggactgcttgaggcctcacgtcaagttcaacatcagcgtgggcaacaaagtgagaccctgtctctacataaaagtaaaatcaaaagtctctggagagaattgtgttggtccagctcgggttagttgtccattcaaccggtgatacaggcagagttggggagtcatggcttctgaagcccacagtatcgactgggagca

SEQ ID NO: 1259 - DNA, 257 bp, Homo sapien; identical to SEQ ID NO: 1118

SEQ ID NO: 1260 - DNA, 102 bp, Homo sapien
acactatcttatgtaacctgtctggtgagtttgtttggacaacctaactcagctttatttgacatggaacctaaaatagaagataagatcttgatattctgt

SEQ ID NO: 1261 - DNA, 476 bp, Homo sapien
actatcgtttgaaatgggaaccagatatgtttccattttatacagataattcagttgcttgaagaagagggacacaggagaaaagatttaaactattggctaaaatgaggtgtcttattattgattttcatctatatcttgtcccataatcaggaataaacagtagctacactgccttgtgtggcagccagagcgctgcttgcttgcacttttaatgattccatcaataccatgtagattgaattagcgaggagaagtaaacctttcatttctttgccagactatattgggaaatgaaaatccgtcattacttttccttgctagcaattgttcgaatatctgggataaagaaatacatacaggaaaatgttagggcagaccaagtattaaaagctaggacagagcaggacaaaggaggaaggataattctacttgtttggcaaagttacatcagttgtcttactgacacatcaggt

SEQ ID NO: 1262 - DNA, 291 bp, Homo sapien
acagcattctggaataaagcaagagtgttcattcacacacacagtagcttcaaaactgttcgatctgtttgttcccatgtagttttctaaagatggaaaaaaaggactttggtcatcaagactactgtggccatattagattactggaacatctaagcatcagtgtgtgaccatgcgaacaaaagacttcggggagtgtctatttttaaaaaggtttatgtgtgtcgaggcagttgtaaaagatttactgcagaatcaagcccacttttaggcttaggaccaggttctaac

SEQ ID NO: 1263 - DNA, 293 bp, Homo sapien
actgaacacaaaatacaaacaaatacattttattgcacataaaaatattttaaatgaagtattgaagtattgcacgtaatagaattgatttaggaaagtcacaaacctattataagactagtattattctaggtctgaagattacagaatatttcctaatagagatttgccacatcacatattgcacattttccaacactattctacgtcttgcaaatattcctcatagtctttgcttatgtcttttctctgtaagacactgtataaaagattataaaggcaaagaaatatgt

SEQ ID NO: 1264 - DNA, 389 bp, Homo sapien
acgctgcttcttcagagcaatacgccgccgtttgtgctgcaggacacgtggagtaacaagacgctgaatcttgggtgctttggtcctaggtttcttacctaaaaattcaaaggactcaatcatttcaatatttgttttgttagaatccacatctactttaaaaacatcagaaataaacgtaagcttaacagcatctatgaaaacctataatgaggcctttaaaatcaaatcagaactattctaaaatgctttttgcccctccacagaaatctagaagattggttaaatattataaaaatataagggaaaccaagtcctgaaaaataaccaggctaacttttactaccttccagttttactaaaatacagtggcattatgttaatatata

SEQ ID NO: 1265 - DNA, 492 bp, Homo sapien
ccgcatttggattggatgaattccaaattctgcttgcttgctttttaatattgatatgcttatacacttacactttatgcacaaaatgtagggttataataatgttaacatggacatgatcttctttataattctactttgagtgctgtctccatgtttgatgtatctgagcaggttgctccacaggtagctctaggagggctggcaacttagaggtggggagcagagaattctcttatccaacatcaacatcttggtcagatttgaactcttcaatctcttgcactcaaagcttgttaagatagttaagcgtgcataagttaacttccaatttacatactctgcttagaatttgggggaaaatttagaaatataattgacaggattattggaaatttgttataatgaatgaaacattttgtcatataagattcatatttacttcttatacatttgataaagtaaggcatggttgtggttaatctggtttat

SEQ ID NO: 1266 - DNA, 533 bp, Homo sapien
actcattttaacattttatgcatgagcatgtgtcacaccaattttgggggtaacagttttgacaacaggaacaaatctaagcaatcgacaaaacagaagccggataactggctctgacccccacccccaacatttaagagatgcaaaggacacctgaattaggttaaaaaaatcaagttgatatggatatttcaacagtgttctgtgctgcaaaactgaaaataaaaccatttaatacacagcccattaatatctgagttacgcttttaggaactgtcaactcgaagattcataaaaagttgtcagcttttaaaaataaactttaagttatctaataatcaggtgaatttcaaaggaggatttactcacaacttgaaaataaattctctttcaacttcttaaaatatcctcattcagctaatgaaaaaggaaacatatatgtatcttttcggaagctcagactagcatatgcccaaaagcctaaagttaaattaatggccaccaaaattgtaaggaaatataaaaaattagga

SEQ ID NO: 1267 - DNA, 257 bp, Homo sapien
actcccgattgaagcccccattcgtataataattacatcacaagacgtcttgcactcatgagctgtccccacattaggcttaaaaacagatgcaattcccggacgtctaaaccaaaccactttcaccgctacacgaccgggggtatactacggtcaatgctctgaaatctgtggagcaaaccacagtttcatgcccatcgtcctagaattaattcccctaaaaatctttgaaatagggcccgtatttaccctatagt

SEQ ID NO: 1268 - DNA, 540 bp, Homo sapien
accagttctaaatgtcagttataagccacagaaaattagtcccaaatcaactggaagtgttcgccagttactacatgaaaagataagagatgcttatactcacccacaatttgtgaccgatgtaatgaagcctctgcaaattgaaaacatcattgatcaagaggtgcagacattatctggtggtgaactacagcgagtagctttagccctttgcttgggcaaacctgctgatgtctatttaattgatgaaccatctgcatatttggattctgagcaaagactgatggcagctcgagttgtcaaacgtttcatactccatgcaaaaaagacagcctttgttgtggaacatgacttcatcatggccacctatctagcggatcgcgtcatcgtttttgatggtgttccatctaagaacacagttgcaaacagtcctcaaacccttttggctggcatgaataaatttttgtctcagcttgaaattacattcagaagagatccaaacaactataggccacgaataaacaaacttaattcaattaa

SEQ ID NO: 1269 - DNA, 517 bp, Homo sapien
gcaaaatattttattcaacaatttgcaatgtaacaattctcatttaggaaaaatagccgctcccgcctggaggaagcttcttgaatcaaaagtcgtggcagtcgaccccagaacagcgggcagagccgaccggaagaggtcccaggattcacacgagctgaccgagggacagagagggctgccccgtcacagggactggcctttctccaagtgacaaggacaaatggatccagcgggacacgcctgtggaacattttggaaaacatcctgggtggtctgggctaaatgatcaagtgaaacagaaagccaggaaggatctgtgctaattccacattctacaatttctacacttaaatttaaaacaccaaacagtttgtattcctccagcagaacctacagaaattatctactgatttttattagtatttaaatcttttcttcagtctctttagacttgacaagaatacgaagagtttcagaacagtcagagaagccttaaagctttgcatcagtgaga

SEQ ID NO: 1270 - DNA, 629 bp, Homo sapien
  misc_feature (1)...(629): n = A,T,C or G
acctgccagaattagcaagagctttctttaagaagacatttgtcaaactcaacaaattgaaggttaacaccttaagagttgtagttactgaccagaaatatggacagacttcttagacttggaggaggtatgcctggactgggccaggggccacctacagatgctcctgcagtggacacagcagaacaagtctatatctcttccctggcactgttaaaaatgttaaaacatggccgtgctggagttccaatggaagttatgggtttgatgcttggagaatttgttgatgattataccgtcagagtgattgatgtgtttgctatgccacagtcaggaacaggtgtcagtgtggaggcagttgatccagtgttccaagctaaaatgttggatatgttgaagcagacaggaaggccggagatggttgttggttggtatcacagtcaccctggctttggttgttggctttctggtgtggatatcaacactcagcagagctttgaagccttgtcgganagagctgtggcagtggttgtggatcccattcagagtgtaaaaggaaagggttgtnattgatgccttcanattgatcaatgctaatntgatggtcttaggacatgaaccaagacaaa

SEQ ID NO: 1271 - DNA, 487 bp, Homo sapien
accctcaataaggttgccatgaagcatccgtcagctgtgacagcttgtaatctggatctggagaacctggtcacagattcaaaccgcagcattgccacgctggccatcaccaccctccttaagacgggcagcgagagcagcatcgaccgcctcatgaagcagatctcctccttcatgtcagaaatctcggatgaattcaaggtggtggttgtccaggccatcagtgccctgtgtcagaaatatcctcgcaaacacgccgtccttatgaacttcctgttcaccatgctgcgggaagagggtggctttgagtataagcgcgctatcgtggactgcatcatcagcatcattgaagagaactcagagagcaaggagacagggctgtcacatctgtgcgagttcatcgaggactgcgagttcacagtgctggccacccgtattctacatctcctgggccaggaggggcccaagaccaccaatccctcaaagt

SEQ ID NO: 1272 - DNA, 160 bp, Homo sapien
actacactttatcttaattcttaatttaaaaacatgtttacaagttacaaccaacttctatgaaaagttgaaaagacaaaaaaaaaaaaaagcgagcgagagagagagcgagagagagagcgagagcagaagaaattcctaaaagtcgatttatttttgt

SEQ ID NO: 1273 - DNA, 438 bp, Homo sapien
acatctattcctcagggagtgtggaggcacagaaactgttattcgggcattctacggagggagatattcttgagcttgttgatggtcactttgataccaagattggacacaaagtagagagtgaaagttaccgaaagattgcagacagcattgggtgctcaaccaacaacattttgtttctgacagatgttactcgagaggccagtgctgctgaggaagcagatgtgcacgtagctgtggtggtgagaccaggcaacgcaggattaacagatgatgagaagacttactacagcctcatcacatccttcagtgaactatacctgccttcctcaacctagagaagggttgttaaggcagaccgccctgttccccagagttgtccctgtagtgtctaggtttattctaatggtaaaagtaacttacttaaaaaacatatgt

SEQ ID NO: 1274 - DNA, 423 bp, Homo sapien
acagtagcatgaatcttgggtatttcgcataatcagttaggtcaagtgaagaagtcgaaaatgtgataagaaatttgtgtgtgtgtgcacatgtaaatctgtaagccagttgacccaagagcaactgaaacatctaatttgttcagctgagatcagacattgttaaatttccattttttagaaggcaattaaaaattacaattccaacagcccacaaaccaaacaaaaaaaactgtagagagaaattaaaactatattcaaagagcctttttttttcagctcaatttcagcaccccaaggaaaataaaagcatccatgactatcacagatgaaaacaaaatgaatgtcattggaatcagttatttttccccactgaggtataaaatctatatagaaatttgatactatactataacaaattgt

SEQ ID NO: 1275 - DNA, 418 bp, Homo sapien
acctatcaaaactattgtttaaaaagtatttttatacactgctaatctaaaattgtatttcagattgtgcctgtcataacaatagcaaatgtaaaaagttctctttcccaccacttgtttataaacctcatagttgatatttttagtgttcctactgttaaaatactctctccttgggctttgctgatactggtctttaatattctgataggtgaatttttctaatggaatgaacccatgcatatatagtatttatatgaatattttagcagtgtaatatgttgaattctagttctctgcattaccattattacgttaaagtattttttaaagcttaggtgtgaagatatgtgtctattgcagacgtccttgaaaactgcataaaacagtatgtgcctggtgtggatcttaccaaagt

SEQ ID NO: 1276 - DNA, 525 bp, Homo sapien
acctagtgacttccaaccaaagcctttgagtatgcactaaataggtgagaagaaaggagagaaggtttttaggttagaaacctttaaccgatagaaggatatggtatgttgtaaagctggaaccaagtttgcatttttgagggcttgagatgaagggaagactcttaccagatagtaagacagctgagttttcctcagttttctcgtcttaacactagtggacaattctagcattttgtttggaggatttcagagttagcctcatggaattcaggattttttagcaagtttgcttttggttttatcttggcttttagtaatcatgttggctggtctggtcacaggtgactgtgaaacagatgccctggtcttgctttcatcactctaggatcatgaagtgctatgctatttcctggttatgaatattaaggttggaattacatttttattgattgtttggatcagagctcagttcctgtagaaaacgaactgtaaaagaccatgcaagaggcaaaataaaacttg

SEQ ID NO: 1277 - DNA, 504 bp, Homo sapien
actctatgagtggggtggtttgagtgtggtaggcttgcaggcggattttcaaggccttttcattatcatctgatcgacggatcaagggttccccggtgatgtcatctttcatgggctcttttggagggttgaactcctcgtggtaggaacggccactcttggggtgaatcagccttcctgtgattcttcggatcagcagagagtctgggatgctgaattcaatcacagaatcaagctcctctttcctcttctccatgaggtcatcgagcatttctgcctgcctcacagtccgagggaagccatccagaagaaaaccatttttgcacaagggggtctccaaattcttctcaatgagctccactaccatttcatcactcaccagtttcccagcatccatagttgccttcagcttttttcctagctctgagccagaagccaccatggccctcagcatgtccccagtagctaaatggcagacacagaagttttcagccaatctgggtg

SEQ ID NO: 1278 - DNA, 568 bp, Homo sapien
  misc_feature (1)...(568): n = A,T,C or G
caaatttgagacaaatagtcggattagaaataaagcatctcattttgagtagagagcaagggaagtggttcttagatggtgatctgggattaggccctcaagacccttttgggtttctgccctgcccaccctctggagaaggtgggcactggattagttaacagacaacacgttactagcagtcacttgatctccgtggctttggtttaaaagacacacttgtccacataggtttagagataagagttggctggtcaacttgagcatgttactgacagagggggtattggggttattttctggtaggaatagcatgtcactaaagcaggccttttgatattaaattttttaaaaagcaaaattatagaagtttagattttaatcaaatttgtagggtttctaggtaatttttacagaattgcttgtttgcttcaactgtctcctacctctgctcttggaggagatggggacagggctggagtcaaaacacttgnaattttgtatcttgatgtctttgttaagactgctgaagaattattttttttcttttataataaggaataaaccc

SEQ ID NO: 1279 - DNA, 346 bp, Homo sapien
acttggagggctcagggcagtggcttctttccagtatggaaggatttcaacattttaatagttggttaggctaaactggtgcatactggcattggcccttggtggggagcacagacacaggataggactccatttctttcttccattccttcatgtctaggataacttgctttcttctttcctttactcctggctcaagccctgaatttcttcttttcctgcaggggttgagagctttctgccttagcctaccatgtgaaactctaccctgaagaaagggatggataggaagtagacctctttttcttaccagtctcctcccctactctgcccctaagctggctgt

SEQ ID NO: 1280 - DNA, 464 bp, Homo sapien
actgtcactcagtctgtaaactacccccagagggtggtttgtttcctcattccttaaaaaaaaaacaaaaacaaataaacaaacaaaaaagaagtttactaaatttaaacactgacatcctgtgaagatgccagtctttacaggcgtttgtaaaagtagactgtggggagtatgttacactaatacaaagttttacaaatgaatacaagtgaaatatataaattacaatgaaatagaggaagattgtggctctgtcctgggttggttcttttagcagtcatattgctgttggtgagagcagcaaaagccacatatgcctccaagcactccatttattacttgaataagacacaagatgaattcaattccaccaagagccaagaggatagaaaacagagatacattccattccacaatgtgcttgggttcagtgcactcggaccatgtggaggtatccagaaggt

SEQ ID NO: 1281 - DNA, 273 bp, Homo sapien
acagaaccgagatggattgggtgttgaagcacagtggtcccaacagtgccgacagcgccaacgatggcttcgtgcggcttcgaggactcccatttggatgcacaaaggaagaaattgttcagttcttctcagggttggaaattgtgccaaacgggatcacattgcctgtggaccccgaaggcaagattacaggggaagcgttcgtgcagtttgcctcgcaggagttagctgagaaggctctagggaaacacaaggagaggatagggcacaggt

SEQ ID NO: 1282 - DNA, 81 bp, Homo sapien
acagatacgcatctactttttctggagccctctttcaagtctggcttatatcgtagttctgtatctaagaccccagaaagt

SEQ ID NO: 1283 - DNA, 435 bp, Homo sapien
accaaataaatgaggtaaaaaggaagggtcatacaaagagggcactacaccagcttcttggcctcaaagaagctcttgaggtgacgcatctgccagatgccagtgaggatgaggatgacagtctgagcaatggaccaccataggaccctctggttggtgctctcgctcgtcagtcggaagcgctcttcacgatacctttggtaatcctgctccttctgaatctgttccacctgatcaagcaactggcgggcgcggagctgtagctccgtcagcttatcttttgcagcaatctcagggtagttgttggcatgctccccaacctggatgtcgagatgcacccgcagtttgccaccagcgaagagagccatcctggtagaattggagtgcagacagatttgatggtcaccgggcgtgtgggaggtgaacgtgaagcgg

SEQ ID NO: 1284 - DNA, 85 bp, Homo sapien
  misc_feature (1)...(85): n = A,T,C or G
aagtgnntagaagccggcgtaaagagtgttttagatcaccccctccccaataaagctaaaactcacctgagntgtaaaaaactcc

SEQ ID NO: 1285 - DNA, 258 bp, Homo sapien
  misc_feature (1)...(258): n = A,T,C or G
ccgggcaggtacagtnnanagatgtagatgcactanatatatctataaataaaatagtgctttaaggtaacaatattctttggctgacttaaatgcctgtggttgactcttagaaaagactaaaatgaaaatggccccactattattgtcaatcttaacacagagcttgtgcggaaggtccctatactgctgactgtcagcatctncaggtccacgatatgttctcttggtcctgataatgacttcacgagcacaagc

SEQ ID NO: 1286 - DNA, 267 bp, Homo sapien
acacggcctcaagggatgtctcacatcctctgtctatttgagacttagaaaaatcctacaaggctggcagtgacagaactaagatgatcatctccagtttatagaccagaaccagagctcagagaggctagatgattgattaccaagtgccggactagcaagtgctggagtcgggactaacccaggtcccttgtcccaagttccactgctgcctcttgaatgcagggacaaatgccacacggctctcaccagtggctagtggtgggt

SEQ ID NO: 1287 - DNA, 378 bp, Homo sapien; identical to SEQ ID NO: 348

SEQ ID NO: 1288 - DNA, 391 bp, Homo sapien
actgtggcgctccgtgaaattagacgttatcagaagtccactgaacttctgattcgcaaacttcccttccagcgtctggtgcgagaaattgctcaggactttaaaacagatctgcgcttccagagcgcagctatcggtgctttgcaggaggcaagtgaggcctatctggttggcctttttgaagacaccaacctgtgtgctatccatgccaaacgtgtaacaattatgccaaaagacatccagctagcacgccgcatacgtggagaacgtgcttaagaatccactatgatgggaaacatttcattctcaaaaaaaaaaaaaaaaatttctcttcttcctgttattggtagttctgaacgttagatattttttttccatggggtcaaaaggt

SEQ ID NO: 1289 - DNA, 249 bp, Homo sapien
acagctcatggataccacaggagatggcggccgctgggttttacttcactggggtaaaatctgggattcagtgcttctgctgtagcctaatcctctttggtgccggcctcacgagactccccatagaagaccacaagaggtttcatccagattgtgggttccttttgaacaaggatgttggtaacattgccaagtacgacataagggtgaagaatctgaagagcaggctgagaggaggtaaaatgaggt

SEQ ID NO: 1290 - DNA, 398 bp, Homo sapien
acaggacacatcagctgagagcaaatcagtttttatgtttactcagcaccatcctcactaaaactattatttttgtcttattttcacccataaaaagtaatgtgggtcatactttattatttaatatgcatttacaaagatctaactattttagggattagcttttttaagcattcttaaagatgaaaaatacaaaaatgacttgtttttatgaattgacatgcttaagatcaactgaaaaaccaagattgagaggcttacaataaatcttttgtaaatgaaataaatggattgcagctgatttattgaaaagtcaatagatttttttgaaacagccaagatcactgaaaatattcagactctcctcacatctagtaagcgttaataaatacagttgt

SEQ ID NO: 1291 - DNA, 288 bp, Homo sapien; identical to SEQ ID NO: 598

SEQ ID NO: 1292 - DNA, 294 bp, Homo sapien
  misc_feature (1)...(294): n = A,T,C or G
gtaccagcttccccatatgacctgtgaagacctcagcaacctggaatggctgagacaagaaacgctgtattttccgtgcacgggacacggtcaacttgtcttcctcanaaagttcatccatacccaggatggcaatgatatcctggagggatttgtagtcctgcaggatcttttgcaccccacgggcaacatcgtaatgctcactgccaacaatgttgggatccatgatacgagaggtggagtctanaggatccacagctggatagatgcccanctcancaatggcacgcgaca

SEQ ID NO: 1293 - DNA, 334 bp, Homo sapien
  misc_feature (1)...(334): n = A,T,C or G
actcaatattatnanaacctcaaataattgacttgattttacacaacatccttcccttttctacaagttaatttttttacaaatcatttgggttatctcctaaataggttatattttattgcttctagaaacaatgtttcaaaatatatgtgcattatcagtaataatttgtataaatatttcccacaacaattttcataattttcaaagactaatttcttgactgaagatattttgctagggaagtgaaactttaaaattttgtagattttaaaaaatattgntgaatggtgtcatgcaaaggatttatatagtgtgctcccactaactgtgt

SEQ ID NO: 1294 - DNA, 263 bp, Homo sapien
  misc_feature (1)...(263): n = A,T,C or G
actggaagatgtcnctgagtttgaaatcacaccagaaggaagaaggattactaaattagatcagattttgctaaatggaaataatataacaatgctggttcctggaggagaaggacctgaagtgtgaatgagtttccttgacttacactagattttgttttggcttataatgacaagaaaatggaattttttttcccactttctaatgtttaaatcccataaagctaagtttcccgttaaagggaagtgctttgaagatgtgt

SEQ ID NO: 1295 - DNA, 330 bp, Homo sapien
acacagacacaaataaaataatattaaaaataaaaatcacacttgctttcaaggcagtggtcctggcactccacatacataatcaacttttcctttaaagaaattgcttggcccaaggagaccacagttagagaaccactaataaagctgtagcccgttgcctgcaacattttcaattcgggtttcaaaaatatataaataatttaattacaaaacccaacattttttttctcttttggcacagtgaagcatcggtcaatagcaagaaatcactgaagagcctctgacatgtctctcacactcagtcatacctggaaatgccacatacgt

SEQ ID NO: 1296 - DNA, 320 bp, Homo sapien
  misc_feature (1)...(320): n = A,T,C or G
acaatgaaaccanactggcgggatggaagcagattattctgccatttttccaggtctttgagttgcacgtcaaatctggggctgatcaccccacacttgtttagcctgcctgtgaggttcacaacaattttcccagctctgtggtcatcaatgatttcaaattcgccaatgtaaccatgcttcatcatcacagtgagaaaccggacgatgactttggagcacggcctaataagcacctggcgtttgcctctcttttcggcattgttgatactcttgagagcatctgccaggacattcatgcgcaccattgtggcggcgcg

SEQ ID NO: 1297 - DNA, 598 bp, Homo sapien
  misc_feature (1)...(598): n = A,T,C or G
gtcttaaggagctttccgacttcctccgagtccagcagtccctgggcaccaggaaggaactgcagaaggagctccaggagcgtctttctcaggaatgcccgatcaaggaggtggtgctttatgtcaaagaagaaatgaagaggaatgatcttccagaaacagcagtgattggtcttctgtggacatgtataatgaacgctgttgagtggaacaagaaggaagaacttgttgcagagcaggctctgaagcacctgaagcaatatgctcccctgctggccgtgttcagctcccaaggccagtcagagctgatcctcctccagaaggttcaggaatactgctacgacaacatccatttcatgaaagcctttcagaagattgtggttctcttttataaagctgatgttctgagcgaagaagcaatactgaaatggtataaggaagcacatgttgctaaaggcaaaagtgtttttcttgaccagatgaagaaatttgttgagtggttacaaaatgcagaagaagaatccgaatcggaaggtgaggaaaattaantggctcaacaggcacaatacctaggttaccacacaccactttttgattg

SEQ ID NO: 1298 - DNA, 397 bp, Homo sapien
  misc_feature (1)...(397): n = A,T,C or G
acagcagaaanatgccaggcaatggtttgctgagctttctgtggatatggaaaagattttggaaataatcagggtttttttaaaactatatgagcagtggaagaatttcgatgagagaaaagagatggcaaccattcttagtaagatgccaaaaccaaaaccacctccaaacagtgaaggagagcagggtccaaatggaagtcagaactctagctacagccaatcttaaaacattccgaagaattccatagtggaccacttggaaataaaccattggacagatttcagtaatgtcttcagtggaacacaaatgaaaatgaatagcttgtttctgtcaagcatattggaaagtgattttatttttgcaaaataagtttttctttaatatgattctagt

SEQ ID NO: 1299 - DNA, 159 bp, Homo sapien
actcatcgaacctgatgcgcccatcatgattggcatccaggttctggatgagcttatccgcagccttccggttccctgtgtccgacagcatgtggttcagctctttctggagcatctcgcggaagctgctcttgctgatcttgttcttgaccaggctgt

SEQ ID NO: 1300 - DNA, 549 bp, Homo sapien
  misc_feature (1)...(549): n = A,T,C or G
agcgtgggcggggnngntgtacagggagaactcacagctccaagagcttccctccaaattatgatgaagttcctgtaaataactagatttcctacagcctggtcctctgcccatgggaaggaggggaaatggatgtgaaaagcaatgtggtctgccctcctgtcattcatagatccagttctgagcacagctcgtgtaatctaccagttcctcagggtgaaaccacaagccgatctccttctctgcactctccacagaatcactgccatgtataatgttcctgccaacttgtatgcagaagtctccacggatggtcccaggcttggagtctgcagggttggtctccccgagcatgactcggcccgtcttcaccacattcagcccctcccagaccatggcaactaccggccctgagtgcatgtatttcaccaaggccggcaaagaatggacggtccttcaggtcaacgtagtgttccttgagaagatcttcggaagcttgnatggaatttcagaccaacaaaggcggnatcctttctgctcaaaaacgct

SEQ ID NO: 1301 - DNA, 296 bp, Homo sapien
actgcacgaagaggatcccgttcaccatcaccttgaaatctgagctctgcaccaggaaggattatatagctggccgggcacagtggctcatgcctgtaatcccagcactttgggagtccgaggcgggtggatcagttgaggtcaggagtttgagaccagcctggccaacatggcaaaaacccatctctactaaaaatacaaaaatttagccgggtgtggtggcgggctcctgtaaccccaactactcaggaggctgaggcaaaagaatcacttgaacccagaggcagaggttgcag

SEQ ID NO: 1302 - DNA, 580 bp, Homo sapien
acagtggtattttttaatacaaaataaacatctgttttatggaaaaaactatacttcatatctacacagacagctcatcttttccaaacaatagccaaaattaaaattaactacaaaatctccaaaacaggggaaactgctttagattaaacgattccaggaaaaatggacccgtaacacattacaagggtgatctaaagattgtggctggaattactgttaaagtttttttttcccaatgcattaaattgtattttggggagatttttctcacttcggcatgatctcagatcatagatgagcaaactaacattaaaatatttacagttaacttgttgctctaaaaataaaactgtttgcctcaatttatttttaaaattcacttacgtatatggaatgtgcttttactcttcttaaaaaagcagctttcatatcacacccttgtttacagaaaagctacatgtgctgcatgctgactttgacacttaagtagcttcttggatcaaaatggcttctagatactaaatgccacttaattcagcactattcttggttggtctgtataagtaacactttaaaa

SEQ ID NO: 1303 - DNA, 364 bp, Homo sapien
acggcggcgaagtgctaaaagggaacggcgatgaacaaatgtaattaataactttctctgcgaaagctttggaaaaatcttttttttttttggtcaagcttgaggctgaataaagcctttgatgcacaaaatgggactgctgaagagtggacagttggaccttactttggtgaccccatacatttgtggtcacatgctttagccatacacatggtaacattgactatggagtcttgtgaaagtgtaatgtgcgatggctatgtagacataaagaagaaacttgtaaatatcttttttctttttttaatgtttctgatttctgaagtgcttgtatagcttttatctgcggctttaaactgacagt

SEQ ID NO: 1304 - DNA, 632 bp, Homo sapien
  misc_feature (1)...(632): n = A,T,C or G
actatctgttcccctgtcctgtgaatggaagcaaagtgctggattgtccttggaggaaacttaagatgaatacatgcgtgtacctcactttacataagaaatgtattcctgaaaagctgcatttaaatcaagtcccaaattcattgacttaggggagttcagtatttaatgaaaccctatggagaatttatccctttacaatgtgaatagtcatctcctaatttgtttcttctgtctttatgtttttctataacctggattttttaaatcatattaaaattacagatgtgaaaataaagcagaagcaacctttttccctcttcccagaaaaccagtctgtgtttacagacagaagagaaggaagccatagtgtcacttccacacaattatttatttcatgtctttactggacctgaaatttaaactgcaatgccagtcctgcaggagtgctggcattaccctctgcagaacagtgaaaggtnttgcactacattatggaatcatgcaaaaggaaaaaaagtttcatgatatctgttgtttggcagttttttgtttatctctgacagttttttagttaaatgtttagatcctcanaaactacattagtgcctactattaacttactctgtctc

SEQ ID NO: 1305 - DNA, 260 bp, Homo sapien
  misc_feature (1)...(260): n = A,T,C or G
ccaagaaagatnnaccgttagggttnggttgtttttgtttttgnnttttttttcttttgaaagggtttgttaatttttctaattttaccaaagtttgcagcctatacctcaataaaacagggatattttaaatcacatacctgcagacaaactgaagcaatgttatttttaaagggtttttttcacctncttattcttagattattaatgtattanggaagaatgagacaattttgtgtaggctttttctaaagtccagt

SEQ ID NO: 1306 - DNA, 483 bp, Homo sapien
  misc_feature (1)...(483): n = A,T,C or G
aacaattcnaccgccatattataaaaactgaaccttgacccatagctaaactttatacaaacctttattcaaaaagtatcatagatataaatgtaaaacttaaaactataaaattcctggatgaaaataatatataatcttcatgacattgggttagacaagtgttcttacattgcacatcaaaagtaaaaaaattgataaagtgaattgtatcaaaattaaaatttttgctctaaaaaagtcagtgttcaaagaatgaaaagacaagtcacagactaggaaaatctatttccaaataatgtatctgacaaaggatttgtatcaatatattaaaaaacatataaaaacagtaagaaaaggaataatccaataaaaaggggagcaaaagatctgaacagacactttgcaagaatatatcatctttaactgtaagatcatcataaggtttgaggtgatatcctgatttgatcattatacaatgtt

SEQ ID NO: 1307 - DNA, 572 bp, Homo sapien
  misc_feature (1)...(572): n = A,T,C or G
cagcagccntggtggaacnaggaggtggagaattgagagcacgatgcatacacaggtgtttctgagtagtaattagatcgctgtgaaggaaaaagcacacctttgagttttcacctgtgaacactatagcgctgagagagacagtctgaaagcagaggaagacatcgatcagtaacaccaagagacaccaaagttgaaagttttgttttctttccctctgttttatttttcccccgtgtgtccctactatggtcagaaagcctgttgtgtccaccatctccaaaggaggttacctgcagggaaatgttaacgggaggctgccttccctgggcaacaaggagccacctgggcaggagaaagtgcagctgaagaggaaagtcactttactgaggggagtctccattatcattggcaccatcattggagcaggaatcttcatctctcctaagggcgtgctccanaacacgggcagcgtgggcatgtctctgaccatctgnacngngtgtggggtcctgtcactatttggagctttgtcttatgctgattgggaacaactataaagaatctggagg

SEQ ID NO: 1308 - DNA, 500 bp, Homo sapien
actttgttatttttccatcactaaaggccaatcagaatttggaaccatgctgctacccaagaaatctaatggaatgaattagttctgtagatgacaatttcttcacccatttatgagacctaaatcttttccataacactcatgtattcagtataacaacatactaactgaaagagggacctgattgtttaaagtttgattgcagacactgtagaacataactcattatgtttcagataaggtaactcctagatatcaaactaatttgttggggtagagattttacaagtcatgccattagaagattttctctgatattatatgtgcagttcagttacaagatgaaatcatgtttttttaacaaaagagataaaatacaattgaagcaaaaaataacagctagtatataatatatacagtctgtatttgcttttcacagtaggcctgatgactaaaagatatgctttattacacgctattttcacctcttgaaagtcaaa

SEQ ID NO: 1309 - DNA, 357 bp, Homo sapien
acagagcacatttgtcagtatttttgccggctggtgaattcaaacaacctgcccaaagattgatttgtgtgtttgtgtgtgtgtgtgtgtgtgtgtgtgtgtgtgagtggagttgaggtgtcagagaaaatgaattttttccagatttggggtataggtctcatctcttcaggttctcatgataccacctttactgtgcttatttttttaagaaaaaagtgttgatcaaccattcgacctataagaagccttaatttgcacagtgtgtgacttacagaaactgcatgaaaaatcatgggccagagcctcggccctagcattgcacttggcctcatgctggagggaggctgggcgggt

SEQ ID NO: 1310 - DNA, 271 bp, Homo sapien
acaaaatgaggccaagacacccttgaagaagttcttgttgaagctggctgtttccagtaaattcaaagagcttcaaaagggtatcatcaggcatgatagtttctgggacaagctcatctttgcaaagatccaggacagcctgggcggaagggttcgtgtaattgtcactggagctgcccccatgtccacttcagtcatgacattcttccgggcagcaatgggatgtcaggtgtatgaagcttatggtcaaacagaatgcacaggtggctgt

SEQ ID NO: 1311 - DNA, 294 bp, Homo sapien
  misc_feature (1)...(294): n = A,T,C or G
acataaagntntattaatattctgattctcgtgtcatagcttttatggcaggaaaggatgaggacatgccccacctgtaacgtagagcaagcaaaccaccaagtagaatcttgagattctctctcaactgttctctagaaacacgcttgtgcttttaatctgccttttaaaagggacacagaacaaaaaatggttgtttgcaaataaacatctgaaagaaagtaacagctgacctgggctgaggcatccaaacaaagcagtcattgtggaaggagacaatgcaaaccacactgg

SEQ ID NO: 1312 - DNA, 125 bp, Homo sapien
  misc_feature (1)...(125): n = A,T,C or G
ttttcccatanncaatcttccttccttaggtaatttggaagaaaactatgacccatttaatttctattgtgtttcacaaaattaagtgttgntcattatactctctgaaatataggtttaatttc

SEQ ID NO: 1313 - DNA, 415 bp, Homo sapien
cagaagggcacactttcatctaatttggggtatcactgagctgaagacaaagagaagggggagaaaacctagcagaccaccatgtgctatgggaagtgtgcacgatgcatcggacattctctggtggggctcgccctcctgtgcatcgcggttaatattttgctttactttcccaatggggaaacaaagtatgcctccgaaaaccacctcagccgcttcgtgtggttcttttctggcatcgtaggaggtggcctgctgatgctcctgccagcatttgtcttcattgggctggaacaggatgactgctgtggctgctgtggccatgaaaactgtggcaaacgatgtgcgatgttttcttctgtattggctgctctcattggaattgcaggatctggctactgtgtcattgtggcag

SEQ ID NO: 1314 - DNA, 400 bp, Homo sapien
acccaaatgaccagatttggtaatgaccatgggtctactcatgggggtttgagtgatctaagaaaacaatggatcaaggatggatgatgaatttggatatgaaaaaccaggaatagactgaaaaccctaacacaatgaaggggagtctgaacagtgaaattataagggaaaagcttgtattaatagaagaaaatgcaaataagattatgaactctgattccaatgtggaggctgtcttcctcatgctgtatatttacattctcacctctgtctggataatttctgatttatactagagtcagagccagtcattggtggtaacagtgaggctttaagactatctcataatttagattaattctaattttctgagaatgctcttctgtctataagtggaagt

SEQ ID NO: 1315 - DNA, 209 bp, Homo sapien
  misc_feature (1)...(209): n = A,T,C or G
cacagaagcggtggangccaaacaggtggctcagcaggaagcagagagggccagatttgtggtggaaaaggctgagcaacagaaaaaggcggccatcatctctgctgagggcgactccaaggcagctgagctgattgccaactcactggccactgcaggggatggcctgatcgagctgcgcaagctggaagctgcagaggacatcgcgt

SEQ ID NO: 1316 - DNA, 536 bp, Homo sapien
gttaactccctcaaaggtatacccttctgcacaattatttatcagtgtgagcctggctatgaactagaggggaacagggaacgtgtctgccaggagaacagacagtggagtggaggggtggcaatatgcaaagagaccaggtgtgaaactccacttgaatttctcaatgggaaagctgacattgaaaacaggacgactggacccaacgtggtatattcctgcaacagaggctacagtcttgaagggccatctgaggcacactgcacagaaaatggaacctggagccacccagtccctctctgcaaaccaaatccatgccctgttccttttgtgattcccgagaatgctctgctgtctgaaaaggagttttatgttgatcagaatgtgtccatcaaatgtagggaaggttttctgctgcagggccacggcatcattacctgcaaccccgacgagacgtggacacagacaagcgccaaatgtgaaaaaatctcatgtggtccaccagctcacgtagaaaatgcgattgctcgaggcgt

SEQ ID NO: 1317 - DNA, 249 bp, Homo sapien
  misc_feature (1)...(249): n = A,T,C or G
accaatctagnctcataacaaaatgaggaaatctagccctcttgccccagagagatttaaatacagagagtcttagtttggactgaaagagaaaaattgctctgatctttctaaagcttgaacattaaggcttctttgcaattttcttagagctctttgatcgttaattatatctttccatcgaagagaagcagatttcttctgagatttctgaacagttcctgggtgtttccggttctgcttcagtgt

SEQ ID NO: 1318 - DNA, 328 bp, Homo sapien
ctcatctgaggaggcctcgtctctgaacttgggttgtgccgagagagtttgttctgtgtttcccaccctctccctgacccaagtctttgcctctactcccttaacagtgttgaattcaactgaaggcgaggaatgttggtgatgaagctgagttcaggactcggtggaccctttgggaatgggtcatgaaagctgccatggggtgaggaaagaggagacagtgggagaggacaatgactattgcatcttcattgcaaaagcactggctcatccgccctacttcccatcccacacaaacccaattgtaaataacatatgacttctgagt

SEQ ID NO: 1319 - DNA, 479 bp, Homo sapien
  misc_feature (1)...(479): n = A,T,C or G
acaaaatngccggaatttagctaatagaaaaacatagtaaatatttacaaaaacgttgataacattactcaagnnacacacatataacaatgtagacaggtcttaacaaagtttacaaattgaaattatggagatttcccaaaatgaatctaatagctcattgctgagcatggttatcaatataacatttaagatcttggatcaaatgttgtccccgagtcttctgcaatccagtcctcttagaaattggtttctctctttgggagattcagactcagaggcagccagaggggacaggtcaagagctgaaataatcacataactactctaattntcttcattctattgactgtgtcaagttatagacacagccaaagtgttttttcttcggcctctgatgatttgagaagatgaagaacatgagcaattttctcattgcttaaaagaaaaacttggcacataagaggctgagtgtagta

SEQ ID NO: 1320 - DNA, 196 bp, Homo sapien
accaatgggatgcagaaactcaaggatggattctcggttcctttttttatggctacatcatcacacagattcctggaggatatgttgccagcaaaataggggggaaaatgctgctaggatttgggatccttggcactgctgtcctcaccctgttcactcccattgctgcagatttaggagttggaccactcattgt

SEQ ID NO: 1321 - DNA, 403 bp, Homo sapien
  misc_feature (1)...(403): n = A,T,C or G
acggatgctacttgtccaatgatggtaaaagggtagcttactggttgtcctccgattcaggttagaatgaggaggtctgcggctaggagtcaataaagtgattggcttagtgggcgaaatattatgctttgttgtttggatatatggaggatggggattattgctaggatgaggatggatagtaatagggcaaggacgcctcctagcttgttagggacggatcggagaattgtgtaggcgaataggaaatatcattcgggcttgatgtggggaggggtgtttaangggttggctnnggtataattgtctgggtttcgccttaagaggtctggtgagaatagngnttaatgtcatttaagganagaatgaagagaagtaagccganggcgtctttgattgtgta

SEQ ID NO: 1322 - DNA, 100 bp, Homo sapien
  misc_feature (1)...(100): n = A,T,C or G
acttcaactaccatgnnaaacacatccttatctgcataaattggaatatcatgaaatggagatatatattgtcctttctcatttttgaggaagactcggt

SEQ ID NO: 1323 - DNA, 295 bp, Homo sapien
actgtttattaaccaaccagcttacaaaaataatcatggtagacaccttagttcattcttctaataagcctgttgatctggtcctcccggttgccagcatctccaccttctacaaaatgggtggtctttttcttcattccacctcgtggaggagacaatttgaagggccacaggaagttatttgcctctttgaagcgttttccaacagtatagatctcatgaatcaaatcctccatgcagatgatgccgtatttaccaagagatcgagcaatcaaagcgtttatctgtcaaagca

SEQ ID NO: 1324 - DNA, 435 bp, Homo sapien
  misc_feature (1)...(435): n = A,T,C or G
actgacctgaaggagacctaagagtcctttccctttttgagtttgaatcatagccttgatgtggtctcttgttttatgtccttgttcctaatgtaaaagtgcttaactgcttcttggttgtattgggtagcattgggataagattttaactgggtattcttgaattgcttttacaataaaccaattttataatctttaaatttatcaactttttacatttgtgttattttcagtcagggcttcttagatctacttatggttgatggagcacattgatttggagtttcagatcttccaaagcactatttgttgtaataacttttctaaatgtagtgcctttaaaggaaaaatgaacacagggaagtgactttgctacaaaataatgtngctgngttaagtnttcatattaaatacatgccttctatatggaacatg

SEQ ID NO: 1325 - DNA, 293 bp, Homo sapien
  misc_feature (1)...(293): n = A,T,C or G
acatgctagaagtctgctgttgttggtaacacanaaacatacacagtcttcatattcaaagtcttcacggggatgtcttctgtaatttcctgcgtttgggtctcattcagaaacagctttagcttcctgctccgaaggccaaacaccttggctgcttcatacagaagaccttggtgggtgagtccattctgcccaagtgggttttcaagcaggagagtgcccactgtccccattaaacactcttgtggctctgcattcaggagctgtaggttgatatactgacaaagaagagt

SEQ ID NO: 1326 - DNA, 529 bp, Homo sapien
  misc_feature (1)...(529): n = A,T,C or G
caagctttttttccncnttttttntttttttttngagncaaaaatatatttactggaatgtttttagttatacctgagggcaacaacatttacaacatttagcttttgttacacctataaatgtggaaattgcttgcaaaacaactgtnatatgaaaggaactatatttctgcaaatattgacanaatggttatgcatntctttcancatataattnggtactntacacaggcttcctgacccccancatgacccgctccctaatgcaataatgcaagtccttatgccattaaaatattaatatgaaatattataatcagngtttatatacncaaataatgaactggcaagtntntagtttcaaattanatccttgaaatatggaaaaatagaggctagttctctttgccttaaacataattnttaaaanaacattttgttanaaaggganaanataattggacattntnaacgttccaatttgaagtgatacttgcctnttantttcttgaaaaanaagttttgaaag

SEQ ID NO: 1327 - DNA, 507 bp, Homo sapien
  misc_feature (1)...(507): n = A,T,C or G
gctgtatgattncgttttgaattttgtttttattttcaagagggcaagtggatgggaatttgtcagcgttctaccaggcaaattcactgtttcactgaaatgtttggattctcttagctactgtatgcaaagtccgattatattggtgcgtttttacagttagggttttgcaataacttctatattttaatagaaataaattcctaaactcccttccctctctcccatttcaggaatttaaaattaagtagaacaaaaaacccagcgcacctgttagagtcgtcactctctattgtcatggggatcaattttcattaaacttgaagcagtcgtggctttggcagtgttttggttcagacacctgttcacagaaagagcatgatgggaaaatatttcctgacttgagtgttcctttttaaatgtgaatttttatttctttttaattattttaaaaatatttaaacctttttcttgatcttaaaagatcgtgtagattggggttgggga

SEQ ID NO: 1328 - DNA, 306 bp, Homo sapien
acctgagatcctggtgcacaacatagtgatcttcatgcgaacttcagtgaagatttcatacattggcctcatgacccagagctccttggagacacatcactatgtggattgtggaggaaattccacagctatttaacaactgctattggttcttccacacagcgcctgtagaagagagcacagcatatgttcccaaggcctgagttctggacctacccccacgtggtgtaagcagaggaggaattggttcacttaactcccagcaaacatcctcctgccacttaggaggaaacacctccctatggt

SEQ ID NO: 1329 - DNA, 568 bp, Homo sapien
acagtctgtttcctccttcacccccagaacaaaaatcgaacttctggttggacagcgtcagatgtcactgaggtgaccccagcctgtttgcagttccaagtcttccgtgtaggcgtcactgctactggaactttgtagatgaggagcctgtatgatgatgtcctgaacatttctatcctttcctcacacagagggaagctactgggaatatcagagacaagctattattaaacaagtgtctctagtccaagacatctcctgtggcagggaaatgagggggcaggctgtatcagtgatatttttataaactctggttttagaaaaaattcttcagatggacgcattattttaagactttaacattttccaaaaccaactgaatcttatcccctccatttatccccctccagacacttctaatcaaggtcaccatctccaacttcccccatagacaataaaaatatggctggagaattctactgtaatagaaaaccaaggagatatagtaatttgacagtgtgtttcctttccatccactagacaagaataccccctcccattctttcct

SEQ ID NO: 1330 - DNA, 231 bp, Homo sapien
  misc_feature (1)...(231): n = A,T,C or G
actgaggcanctccaacctcaccgtgtagtttgttcccttctcaaagcacaccggccgaggaaggacgacatatcttgagcctggtgataatgacaccacctggttgtcatcatcggggatggtattaccacatcggctgctggttggaatccttccaggtcgctgcactgtgatgacagctttttcccagtggtcgggtagctgtggctcgtancgaattangatgtcgt

SEQ ID NO: 1331 - DNA, 554 bp, Homo sapien
ccgcatcctagccgccgactcacacaaggcaggtgggtgaggaaatccagagttgccatggagaaaattccagtgtcagcattcttgctccttgtggccctctcctacactctggccagagataccacagtcaaacctggagccaaaaaggacacaaaggactctcgacccaaactgccccagaccctctccagaggttggggtgaccaactcatctggactcagacatatgaagaagctctatataaatccaagacaagcaacaaacccttgatgattattcatcacttggatgagtgcccacacagtcaagctttaaagaaagtgtttgctgaaaataaagaaatccagaaattggcagagcagtttgtcctcctcaatctggtttatgaaacaactgacaaacacctttctcctgatggccagtatgtccccaggattatgtttgttgacccatctctgacagttagagccgatatcactggaagatattcaaatcgtctctatgcttacgaacctgcagatacagctctgttgcttgacaacatgaagaa

SEQ ID NO: 1332 - DNA, 472 bp, Homo sapien
  misc_feature (1)...(472): n = A,T,C or G
acaaggcatttctgacatttnataaacctacatttaaggggaatttttaaaggaaatgttttttcttttttttttgtttttcgagggggcaaggagggacagaaaagtaacctcttcttaagtggaatattctaataagctaccttttgtaagtgccatgtttattatctaatcattccaagttttgcattgatatctgactgccactcctttctttcaaggacagtgttttttgtagtaaaatcactggtttatacaaagctttatttagggggtaaagttaagctgctaaaaccccatgttggctgctgctgttgagatactgtgctttgggagtaaaaaaagaaagttatttctttgtcttaaagaatttttaaaaaattagtcatgagacttattcatntttccagggaacatactgattggtcttaaaagactagacagttaagtaaaaggtggctggaacatctat

SEQ ID NO: 1333 - DNA, 495 bp, Homo sapien
  misc_feature (1)...(495): n = A,T,C or G
accctcatcattgctnttctagccattcatgccccctcttcctctggcacattttctaagagtttatttcataagcagcaaacggactgttgtcgatttcatctctcctgacctacctggtggaggtgctaatggccatggacagaaaggggcgagccagagctcgtggctttgtggaggcagaggcctgcattcagcagcggccctgtgtgcctgtaagttaggaaggctttctgacaggtaagaaaatgagataggttgatgacttaccatgcttttatatttggcagtttacaattctagacttttcctactatggcgatctttttttacttaattctttggaggtaacaatattttggagtcttaagaatttgattttataccaataagaaataaaaattagggatctttcctgtagtatatagttttactattttaaagagatctctgaattttactagagaaccaacattccttaatggcagaactttg

SEQ ID NO: 1334 - DNA, 239 bp, Homo sapien
actaattatggggggagcaggtgaagtagctgttgggaaagaaggtgtatttgctgtggtgctagcagtttcagggaaattagtttcagtggtatcagctgcagctactgtaggaccactagtcgcagtttctgtggttgctacagcatcagctgagttgccttggttggtggctgtgtttacagaaaggagagcaagaagagtaagatgaatgatggctttcattttagctgttcttg

SEQ ID NO: 1335 - DNA, 457 bp, Homo sapien
  misc_feature (1)...(457): n = A,T,C or G
actttaatatttatgcngntgttttcttgtttcttttttactcactgcagtatgaggaacaaatcacaaacacttactttggagaaacagagaccgtagtgtagattttacaaaatcactttttaaaatctctgtattgngctcctcaaatacctagagccagtctttgcataaaatatcacagctttatctataaccttaaaattctgcagcagcctaaagatatggataagatataccaccacttgctattctgaaatatatctattaccatatccaacctaatgatagtatctaaaaaattctttcttccataggaagtctctgacaagctgttattcatttccttgacgttaaaagaatctggggccaacatttgtattttatcagaaaaaaataaaaaaaaagtttacctaccatgttcatattaagaacaatgtctatacaagtcagttgt

SEQ ID NO: 1336 - DNA, 387 bp, Homo sapien
  misc_feature (1)...(387): n = A,T,C or G
actcacaagtaannaactttctctactgaaggatactgtcacagagtttgttgcagagcatctatatatatatttatttatttattttaaaaaataaacaacaatgatgaacgaacccaggttcctagaaccaattctcttgattctctacttccacaaaataaagtgtatcatttggccaagactacagatgtgtttttttttttcacagatgcaagtgccatgcaaaaataaattaaagaacagataccaaaacatacatgtgataaaactacagaaggtagatttttaaaagcatttatataaacataatttataatacttctcttttttcctttatatacagtcacaaagctgtagttatacatctaggatttcctctgctgt

SEQ ID NO: 1337 - DNA, 390 bp, Homo sapien
acctgacatcttttcctgcattctctaccaggaaataaagatgaaattaaatatcaaaattctaatcgatgatatcagtgcaatgttcaggaactattcattaagatattagaaaaccattcaaagtggtaggacatcagagcctacttcttacattgctgtgggagaaatgcaggtttcaaatttaatatatatatataatttttttaaaagcagaagtttctttttatatttggtaaacttaagttccataaagccagacgctatacagtgcaaaggctaatgtggcaatagctctaaagacacagttgctgctcaggttttatgtatagataatagaaagcacagtttactaacacagtaaaccaacagagttcaagtcagatgagt

SEQ ID NO: 1338 - DNA, 363 bp, Homo sapien
acagatctttaatagaaaagtatatctctttacagtagaaaaatatctgaacagtcaacttttcttaagacaaaaattcaaatgtaacatactacctaaactataaatttagctaaaactgaatcgagctgtttataagaactgattccaaaatatacatatatgaatttacataaccgatatgtagaagctcttcaaaatcgactgtaaattgaaaagttaaaattggccttgcctctgcagtttggagctgcaatggctgccagtatcggctgttttcttggtgcctgagctgcagggtgggcctgtcgaggaggggctgctgtctgggtcgctttccctctggctgtctgtggcgtaggt

SEQ ID NO: 1339 - DNA, 278 bp, Homo sapien
acttgctggtctcaaatttccacaaggagatatcaatggtgataccacgttcacgctcagctttcagtttatccaagacccaggcatacttgaaggagccctttcccatctcagcagcctccttctcaaatttttcaatggttcttttgtcgatgccaccgcatttatagatcagatggccagtagtggtggacttgcccgaatctacgtgtccaatgacgacaatgttgatatgagtcttttcctttcccattttggcttttaggggtagttttcac

SEQ ID NO: 1340 - DNA, 333 bp, Homo sapien
  misc_feature (1)...(333): n = A,T,C or G
aaagaggntgnatcaagtttaaatgactgtgctgcccctttcacatcaaagaactactgacaacgaaggccgcgcctgcctttcccatctgtctatctatctggctggcagggaaggaaagaacttgcatgttggtgaaggaagaagtggggtggaagaagtggggtgggacgacagtgaaatctanagtaaaaccaagctggcccaaggtgtcctgcaggctgtaatgcagtttaatcagagtgccattttttttttgttcaaatgattttaattattggaatgcacaatttttttaatatgcaaataaaaagtttaaaaagttaaaaaaaa

SEQ ID NO: 1341 - DNA, 387 bp, Homo sapien
  misc_feature (1)...(387): n = A,T,C or G
accctctgtcaanagaggagatgttgcctncaacagcagggaggaatgagacctgggtggcttcccanaagtcagtgtttccggcatgactggctcctttcctggcaaacactacaatgtgtcacactacagctagcaattcctccccactccctcccagcccttcctccctccaccccacaaccctatagccatttgaggcaaatggctttctaaaggcccagggatagatgtgccaggcttgcctcttaatggggtcaaagtgagttttgctttggaaaaattcaaacaggaatgtaaaatggtttgagctctttctagtccaaccaaaggtgattacatccagcccctctcaagggaatgggggcagagactgtcgctcctgaa

SEQ ID NO: 1342 - DNA, 241 bp, Homo sapien
actgtgccttgacctcagcaatgatgctgtccatgtccagggagcggctgttgtccatggacagcaccacagatgtgtccgagatctgggactgcagctcccggatctcctcttcatacagctgcctgaggaagttgatctcgtcggtcagcccttccaggcgagactccagctctaccttgttcatgtaagcttcatccacatccttcttgatgaggacaaattcgttctccatctctgt

SEQ ID NO: 1343 - DNA, 347 bp, Homo sapien
  misc_feature (1)...(347): n = A,T,C or G
accgcaagggtggnttngatgaagtctgactactttttttcaaacaaactattatattaaaactgtcatattttggctaagtttggacctataactacactttcattgtttgcatctctctatgaagatacgtctgtccaaacttttaaaaggcataactgtattttatgtgtttattctttatatagatagtannttatattttattctcacccgaagtattcacacaatcttttttaaaaaaaatttgaaatggcattttgtattgccacagaggtaggatgagccatatattagtgaaatgttttattttgtaaaatataaatggattatttgccatcattagt

SEQ ID NO: 1344 - DNA, 186 bp, Homo sapien
  misc_feature (1)...(186): n = A,T,C or G
actgaaggatttntcntctgttcacacgcaggcgttcaagctcaaaagcctaacccctagcactcccacataactgctgaaccctgcacatgggaacagtccagtgtgtccccaagatgtggccgcagacctagacagctgcagtcctctactgctatctgaaggttcctgacagctctgcatagt

SEQ ID NO: 1345 - DNA, 110 bp, Homo sapien
  misc_feature (1)...(110): n = A,T,C or G
gcaatcccggctttncccattcagccagggggatgcggcggccataggtcangaggctgcgtccgatgtcctcacacacaggagtagtgccatctagatgagataccagg

SEQ ID NO: 1346 - DNA, 414 bp, Homo sapien
  misc_feature (1)...(414): n = A,T,C or G
tactgcatctacnncnaccgcaaaanacgaantgaccccaacttcaagaacaggcttcgagaacgaagaaagaaacagaagcttgccaaggagagagctgggctttccaagttacctgaccttaaagatgctgaagctgttcagaagttcttccttgaagaaatacagcttggtgaagagttactagctcaaggtgaatatgagaagggcgtnnaccatctgacaaatgcaattgctgtgtgtggacagccacagcagttactgcaggtcttacagcaaactcttccaccaccagtgttccagatgcttctgactaagctcccaacaattagtcatgagaattgtnagtgctcanagcttggctgaagatgatgnngaatgagaaacaaatntcaacataataaaatctcagtt

SEQ ID NO: 1347 - DNA, 324 bp, Homo sapien; identical to SEQ ID NO: 613

SEQ ID NO: 1348 - DNA, 433 bp, Homo sapien
  misc_feature (1)...(433): n = A,T,C or G
ccaatattggggcanatctaaaaggcagaagttgatgaagagaagcctcattaccccctagatgcattttgtatatgcttcatgttatataaattctccagtggtgtttgagagaaaatggctaagnagcattaccataaattgaaaataaatttttagtatttttacatccatcaaaggcaaatcatctctttcagtgttttcttattgtctgatcactaaataattcctgcctttggtccctagaccaaagagcttcacacattccaaagagaagctggatattgacatttataaccacagacaaatggatagggaaatagcttgggaaaacaagaaggatgaagatggcagcatttataatttcaggggaaccgtccatagatcacatattaagcattttgtagagtctctaccatgtgttcggaaatgt

SEQ ID NO: 1349 - DNA, 415 bp, Homo sapien
acatgcagatgacttgagagaaggtgcacagtatttgatgcaggctgctggtcttggtcgtatgaagccaaacacacttgtccttggatttaagaaagattggttgcaagcagatatgagggatgtggatatgtatataaacttatttcatgatgcttttgacatacaatatggagtagtggttattcgcctaaaagaaggtctggatatatctcatcttcaaggacaagaagaattattgtcatcacaagagaaatctcctggcaccaaggatgtggtagtaagtgtggaatatagtaaaaagtccgatttagatacttccaaaccactcagtgaaaaaccaattacacacaaagaatccaaaggccctattgtgcctttaaatgtagctgaccaaaagcttcttgaagctagt

SEQ ID NO: 1350 - DNA, 202 bp, Homo sapien
  misc_feature (1)...(202): n = A,T,C or G
ctgcaattgnaacaacagaaaaatgctggcaccagaacgaatgagggtcctctcatcgttactgaagagcttcactcccttagttttgaaacccaattgtgccagcctggtttggtaattgacctcgagacgacctctctgcccgttgtggtgatctccaacgtcagccagctcccgagcggttgggcctccatcctttggt

SEQ ID NO: 1351 - DNA, 232 bp, Homo sapien
  misc_feature (1)...(232): n = A,T,C or G
accagcaactcncnaggtttctgccagcccactgttgtatacgcttattgagaaaacaatgcaaaatgtgaagcatccggttactgggcaatttctatatcaggacagcaactgggccagcaaagttgagaaactcactttagacaatgctgctttccctttccttgcatattctggaatcccagcagtttctttctgtttttgcgaggacacagattatccttatttgggt

SEQ ID NO: 1352 - DNA, 343 bp, Homo sapien
  misc_feature (1)...(343): n = A,T,C or G
acaaccagaaaatnntgtgggatattgaattatgggaggctctgactgtctcgggtgtcagcttaacattccacagatggggggttagtttttatatcctataatacaaagcatattaaatggcaatatggagtcagtcctgcatttaatgtcttgaacattttaaattacttctattaccatgttgttttttagtagaattgtttcctaaagaaaaccactctttgatcatggctctctctgccagaattgtgtgcactctgtaacatctttgtggtagtcctgttttcctaataactttgttactgtgctgtgaaagattacagatttgaacatgtagtgt

SEQ ID NO: 1353 - DNA, 579 bp, Homo sapien
  misc_feature (1)...(579): n = A,T,C or G
acaaagataaatgtttcttcacaaaacggccaaatcagtaacacaggctttgtgttcaaagtattgattagtgcatacttcactaataaagaatctatagtatgtattttattagtattctagaaaatttcagacaatcagcaaatggaatgaattttattatcaatatgccatagaaattcagtcatctaatttttctagcttatgttatgttgagcctgcatgtggtctctctacctggaggagggacaggataagaccagcagtatcccatatgattccaaatggaagtccaataatgtattggaatttgctacatctcatatccaaacagtgctttatctacattaatggatgagtttgtgattttaatatggaaacaaatgagtgattcgagttgttcaaaatataatttttgaatatacttttgtgattgatagttatgcctcaatcactatgaaactcagagtattattaaaaagaaccttcccctctttcttagcactaaattcaggctcttgtagatctttcccaagctctgctntgannatcaggtggtgctgtggcattaaagttgca

SEQ ID NO: 1354 - DNA, 358 bp, Homo sapien
  misc_feature (1)...(358): n = A,T,C or G
acctagaatatcaacngagtcttttaaatgaaagtgatggaaaatcaagatggttctactcaccgtggttgttggtagaatgttacatgtatcgaagaattcatgaagcaattatccagagtccaccaatcgattactttgatgtatttaaagaatcaaaagagcaaaatttctatgggtcacaggaatccatcattgctttatgtactcacctgcaacaattgataagaactattgaagacctagatgaaaatcagctgaaagatgagttttttaaacttctgcagatttcactgtggggaaataagtgtgatctgtctctctcaggtggagaaagtagttctcagaataccaatgt

SEQ ID NO: 1355 - DNA, 303 bp, Homo sapien
accaggagctgctacagagcgccagcgcaagcccaatggacattgcagtgcaggagggaaggctgacatggctggtttacattattggagcagtgatcggtggccgggtttcttttgccagcactgatgagcaagacgccatggatggtgagcttgtctgtcgggtgctccagctgatgaacctaacagattctcgtttggcccaggcgggtaatgagaagctagagttggccatgctgagcttttttgaacagtttcgtaagatctacattggggaccaagtgcagaaatcctctaagctgt

SEQ ID NO: 1356 - DNA, 394 bp, Homo sapien
  misc_feature (1)...(394): n = A,T,C or G
acgtgtggtcangnngaagtctgttctgaaggtgctgggagaatatcctctcattgtctgtaaacgctcccttcatctcattaaagacgactcctttaaagaccaagggcgtctgggggtcgctcggattctcatgttccagccgccatccttcctgccagaaatccagctcgcgtaaacatgggaaaaaggtggcatccaaatacaccgagaggagattctgaaagtccttgggattttgtgtggaaaatggatacagagtataatcactagctgtgaaggcgttcatgaacgtggagagggaccggctcaacattttgaagaaagggtctctgcacggatatttctgagacccacaaaggacggtatgctcaagaatgtgaggaacaccagt

SEQ ID NO: 1357 - DNA, 311 bp, Homo sapien
  misc_feature (1)...(311): n = A,T,C or G
gtggtggcgcgnncctgtaatcccagctactctggaggctgggatgggagaatcactggaacctgggaggctgaggctccagtgagccgagattgcatcactgcactgcactccagcctgggtgacagagggagaccctgtctccaaaaaaaaaaaaaaacaagcttttacaaatgttattagtgtccttttttatttctaatgccttgtcctcttaaaagttattttatttgttattattatttgttcttgactgttaattgtgaatggtaatgcaataaagtgcctttgttagatggtgaaaaaaaaaa

SEQ ID NO: 1358 - DNA, 595 bp, Homo sapien
acttgatgataacggttttaaaatccttcactcgttctttctcaaatcttcccacttcttttcgaatcgttttagatatctgttcaaaatctctttccccttgttgcactttcgcctcccactctcttatttcatttttagcttgctgtattttatctggtttgttagcaaccatcatttttgcttcagcttcacgttttttgagcaaagtaatttgagcatcttcccatttctgccagcacttcattcgatggtcaaacacacctttcactgcagcaataagacgaatgtagtcactaagtagttctgaaaacatataaaagtcagcaaaagcttgttcttgatgtaactggtctatcttctcctcaacctctgcaagctgagacaaagctctagataaagcagtatgatcctcagaattacctaacatggcagcacttttagcaaaggcagctgtgttggctgaaagttctgaaatttaaaaaaaagtatgcaattttagtgttcactcataaaattttaaaatattgtattgatttttccacttttctctaaattttacttatgcacaagttgctcaaataatattttaaat

SEQ ID NO: 1359 - DNA, 391 bp, Homo sapien
accctgtgccagaaaattggctccacaaggaggctcaccagctcttcttggaacctgaggtgctggacccagagtctgtggagctgaagtggagcgagccaaatgaagaagagctgatcaagttcatgtgtggtgaaaagcagttctctgaggagcgaatccgcagtggggtcaagaggctgagtaagagccgccaaggcagcacccagggccgcctggatgatttcttcaaggtgaccggctcactctcttcagctaagcgcaaggagccagaacccaagggatccactaagaagaaggcaaagactggggcagcagggaagtttaaaaggggaaaataaatgtgtttccccattatacctccttcaccccagaatatttgccgtcttgt

SEQ ID NO: 1360 - DNA, 257 bp, Homo sapien
  misc_feature (1)...(257): n = A,T,C or G
actatagggnaaatacgggccctatttcaaagatttttaggggaattaattctaggacgatgggcatgaaactgtggtttgctccacagatttcagagcattgaccgtagtatacccccggtcgtgtagcggtgaaagtggtttggtttanacgtccgggaattgcatctgtttttaagcctaatgtggggacagctcatgagtgcaagacgtcttgtgatgtaattattatacgaatgggggcttcaatcgggagt

SEQ ID NO: 1361 - DNA, 274 bp, Homo sapien
  misc_feature (1)...(274): n = A,T,C or G
catgggttcnntccatttttgntntttgtgtttttaattaaaagaaaggttacctcagttttcactccttanacatggatgtagctacctttttttgtatgtcttttttttttaagcaatcgtgttgaattaggagtatacttggtgtggaaagagtatgaatttgccatgtgatttgcanntggggggaagctactgtgagcgtgtgtttttttaatttacactatnnagtgatttttttttnncccaacgtcaagttttttaccttgcatgt

SEQ ID NO: 1362 - DNA, 334 bp, Homo sapien
  misc_feature (1)...(334): n = A,T,C or G
actcaatatnatncaaacctcaaataattgacttgattttacacaacatccttcccttttctacaagttaatttttttacaaatcatttgggttatctcctaaataggttatattttattgcttctagaaacaatgtttcaaaatatatgtgcattatcagtaataatttgtataaatatttcccacaacaattttcataattttcaaagactaatttcttgactgaagatattttgctagggaagtgaaactttaaaattttgtagattttaaaaaatattgttgaatggtgtcatgcaaaggatttatatagtgtgctcccactaactgtgt

SEQ ID NO: 1363 - DNA, 585 bp, Homo sapien
acacttgaaaccaaatttctaaaacttgtttttcttaaaaaatagttgttgtaacattaaaccataacctaatcagtgtgttcactatgcttccacactagccagtcttctcacacttcttctggtttcaagtctcaaggcctgacagacagaagggcttggagattttttttctttacaattcagtcttcagcaacttgagagctttcttcatgttgtcaagcaacagagctgtatctgcaggttcgtaagcatagagacgatttgaatatcttccagtgatatcggctctaactgtcagagatgggtcaacaaacataatcctggggacatactggccatcaggagaagggtgtttgtcagttgtttcataaaccagattgaggaggacaaactgctctgccaatttctggatttctttattttcagcaaacactttctttaaagcttgactgtgtgggcactcatccaagtgatgaataatcatcaagagtttgttgcttgtcttggatttatacagagcttcttcatatgtctgagtccagatgagttggtcaccccaacctctggagagggtctggggca

SEQ ID NO: 1364 - DNA, 138 bp, Homo sapien
  misc_feature (1)...(138): n = A,T,C or G
caaaaagctgcattngaggatagcantggcagctccgagttacnngaaattatgagaagacgacaggaaaaaatcnntgctgccgctagtgattcnngagtggaatcttttgatgaaggaagcagtnactaatttgtt

SEQ ID NO: 1365 - DNA, 270 bp, Homo sapien
  misc_feature (1)...(270): n = A,T,C or G
actctctctgaaacanctacaaacatcttgtttttgcaaaatatacaatgtttctcaatctttctgtccttatctcaatttgcaaaaatattttgaaacaatctcctttaaatgttattcttgttaatgagggcaaatcttttaaaatccacatgctagatcttgaaaacgcttgagaagaaaataaactgtgaaaggagtggttatttaaatacttcaaactgcacatgtgaaacanacccactatttaatcanaattctatgcaagtt

SEQ ID NO: 1366 - DNA, 182 bp, Homo sapien
  misc_feature (1)...(182): n = A,T,C or G
acttaaattctttnngatatatgctttaggtgatgggtgttcacaatgcaaaaatcctctttgctctactaaaaaatttcccaaaggattaattcacagggtgaaaatagtggtggatctgaaaaaattagctacaagttaaagttcttgtggagctagcaatcactccaacccacactaag

SEQ ID NO: 1367 - DNA, 187 bp, Homo sapien
  misc_feature (1)...(187): n = A,T,C or G
actcaaccatcttaggncatcagattggactttcaggcagggaagcccacgaggagataaacatcaccttcaccctgcctacagcgtggagctcagatgactgcgccctccacggtcactgtgagcaggtggtattcacagcctgcatgaccctcacggccagccctggggtgttccccgtcactgt

SEQ ID NO: 1368 - DNA, 160 bp, Homo sapien
  misc_feature (1)...(160): n = A,T,C or G
actaggattacnggcacaagccactgnacccagcctaaatctcttaaccaattacctcctccactaccatctcattctatgaggccagcactccctganactaaagccaaagacacctattaaaaacccaaagcttacagaccaatatcatatcccttat

SEQ ID NO: 1369 - DNA, 416 bp, Homo sapien
acttctacacaaggcctcttagtgacgtcaatcaattggaggtaggagtttatcaatgaattgcttgacatccatcatttcctgttgacacgaactgtgcatcataccttcataggttttaaaggtcacattggctggattcaccaatgtttttagtttttccaccgtaagagaaccaaacatcaggggaaccaaagggtcacaatccccgtggcactggagaatagaaatatctctattagcaccaccgataggaccctgtggaaaggaagcccgaagtggaagccagcaactgagtgcagtgacacctgccagtttctgctgtgtggtaagggcagtatataaagataaagctcctccctgagaaaaccctcccaaaataattctgttagaaggaatgccattcttcacttctt

SEQ ID NO: 1370 - DNA, 553 bp, Homo sapien
  misc_feature (1)...(553): n = A,T,C or G
agtttgagttcttctttgtggaaacttaagatgtggtgtaaatgattctttccaaaattgtccagcagcttgaatgaggcagtgacaattctgaggtggtttattgggagtccttctacatttctcttagataactctgcactctgggtggctattgtgtagccttactgccccagagtgcctgttagccaaatatttcccctctgataggaatattttctaagaatcagctgataacttgcgtgctggaccttgntatctgtgcccctgggagacacacgttttcttggttttgaaaacctgaaacacaggcaactttacattttggggaattagctgatgcctcctgaagcctgaggaggtggcggggaatatgagcggtgctgtctctctcaaaagtgccctttagatgattccccctcctagggctgcctgcaggggctgtaggcttgggaaagattgtgtaggtnacagtgaatcagaatgaagtggtngattttgngtangatgcatttgtctgctgtaatttnttatatatatattaaacttactg

SEQ ID NO: 1371 - DNA, 292 bp, Homo sapien
  misc_feature (1)...(292): n = A,T,C or G
acacagcaggtcnntcagtgccttatagaggaggccgttcagggccctcaggcgcgcatggtcttccttcctggttttctttgaggtgctcctcatgaggaattccaacttggatggtttgtaagtcgagtgagaacccaaggaaggactttcataccaaaccttttttttggttttcgaggcaaatttcttgagccagttcttgcangagacagcanagcagtgaagtccccgctcgcagcctggaaatagcgcagcatcgcggctacggaacagggcccggagacccgcg

SEQ ID NO: 1372 - DNA, 133 bp, Homo sapien
  misc_feature (1)...(133): n = A,T,C or G
gaaagggagccagannactgattggagggccctatcttgtgagtggggcatctgttggactttccacctggtcatatactctgcagctgttagaatgtgcaagcacttggggacagcatgagcttgctgttgt

SEQ ID NO: 1373 - DNA, 441 bp, Homo sapien
  misc_feature (1)...(441): n = A,T,C or G
acctattaggaaaaccanatattgcaaatggtcaattcgattttaatttctcaaaagatactctgttatccagaagattaaaatgcctacattgagtgcttaaaaaaaaaaacaactgtgatgatgtgagcagaatggcaagtaagttaagcatttttgatcctgtaatcatggtatcattacaatgaaaggaattcacaaactactgccagaggaagtttgtttttttaatttaagagggaaatataacctataaatttgtttcttccaagcttagctcttaaatttggagactcaaagttaaacatcctcaacagagttttatttataattttgaattgnnaatttgtattttgctactgatctgtgatcaaccattttaacttttcatctctagggatgtttaacattnataattgcaaaataaaccanctataaaaa

SEQ ID NO: 1374 - DNA, 375 bp, Homo sapien
accaatcaggttgctgtgagaaaactgacaaaatatgcaataaagaataccaagagagaaaggacaatcgccaattcagtttcccagaacagaatttttatgaactgcacaaatgtttaatgtaaatggtgatacctacagggaagaaatagaagagttgataatatatcactgggacggggtgggggaaagacttgaaatttttggtgcctaacactaatggtccatatgtagttaaacccatgagtatggtatatgaatgtcttttttaaatgttaaaatgtgttgtctatttaatgttaattaaaatgcagatcaaagcaccaccatttgctttttccacagatcattaacatttccttaaagtatgtaagt

SEQ ID NO: 1375 - DNA, 532 bp, Homo sapien
  misc_feature (1)...(532): n = A,T,C or G
actgagaacaatttaactctgaacacaaaagtttagtgaatttgctactgttccattacaggacaattaaaaatgagactatatcaacttcactagaatttaattgctaaagctaccttatgcacatctattaaactaaaagaaacgactttaaccccttcagttgtttttaagacagcactcctttacagggagtcaggtttggtaaatataaaggatacataaaaaatacagtataaactgcataagcttaacagtagcaaaaacactgatgaacttttaaaaagtcaaaaatatataaaaatattagcctgaaatggcaaattttcaaacaccgatctgtgtaaaaatgtttaaatattgatgttactccaaaaatatatacttattctattttttttctatttgcaacagtttataaaggcaaacaaacacctgcaattgaggtagcaaaagccaaattcacaaactttggatcaagaaaaatacccttcctatgttttaacagcatcttctatacaatagngaatga

SEQ ID NO: 1376 - DNA, 263 bp, Homo sapien
accaaaaatacatttcttaaggttaaaagcatgcacttccatgcatacttgcttttggggagagtggggagaagacattctaataatcagtttgtgaaatagcttctgttggaaaccttttgaggggaataaggaatggtcatctaaaatgagagattctggattttaatgcagttcaaagttgagctgtatttttgttgttgatttatctggattttttttaaagccttctaaaacccagtgaattcaataccttaattagt

SEQ ID NO: 1377 - DNA, 366 bp, Homo sapien
  misc_feature (1)...(366): n = A,T,C or G
acttttgaaaatannnctgcttatttgtaaactctgtaattaggaccttttgctatttgagttatattcctttctaacttcaaacgtctgcattcatgtataatagccattttatgcacagatgaggtgattcccacacttcttttcgcagatgtttcattatctggatgagtgtattacataataaatttgaataatggtagtcttccaaacgacaaaaagcaagctagttgatttgtcaattttgagtttaaatgttttgactgcttatcangcaaaaaaaatcaaaggaatagcatactaatattaatggaaatgcanagtatatttaattggcatgattttttcatggatgtgtgcttcatt

SEQ ID NO: 1378 - DNA, 309 bp, Homo sapien
acaaaagtatgtcttttaaaatggaagtaacgtttgtttagctagtgaatgtgacaatatattttatgtatataatgagtctaatgtaattttgatcaacttggtaatgatgttattaaatagcaaaacaagtgcagtgtattaaagctaaacactacattgaaacgcaaacaaaattctggtgaaataactgggctgttgatgcaggtcaggtggaagctgagaaataaatgtatataaatatgtagctgaggatattaattcccattatataaccataattctgtgacttgtaataaaccaagctgt

SEQ ID NO: 1379 - DNA, 186 bp, Homo sapien
  misc_feature (1)...(186): n = A,T,C or G
caagcttttttttttttttttttttttttttttttttttttttagggcncccgctcataaggggatggccatggntaggtttatanatagttgggnggttggngtaaatgantgaggcaggantccnaggaggttanttgnggcaataaaaatgattaaggatactagtntaanaaatcaggttcg

SEQ ID NO: 1380 - DNA, 278 bp, Homo sapien
  misc_feature (1)...(278): n = A,T,C or G
ctccccccgagcgccgctccggctgcaccgcgctcgctccgagtttcaggctcgtgctaagctagcgccgtcgtcgtctcccttcagtcgccatcatgattatctaccgggacctcatcagccacgatgagatgttctccgacatctacaagatccgggagatcgcggacgggttgtgcctggaggtggaggggaagatggtcagtangacagaaggtaacattgatgactcgctcattggtggaaatgcctccgctgaaggccccgagggcgaaggt

SEQ ID NO: 1381 - DNA, 237 bp, Homo sapien
actatagcataacctgcctttgctggtgtgtggcgattaggcctggtggaacttccatcaataaatcaagcgtgatcagggtgaggaacaggaaagaaggaaatatggggtgaatatcaggtggatcagagagatacagtcatggaggtcaggtgtggtatcaggaataatgtgggaggccagattgaagtccaggccaggaacaatggtaattgtgggacttaagaaagtgtgagt

SEQ ID NO: 1382 - DNA, 257 bp, Homo sapien
  misc_feature (1)...(257): n = A,T,C or G
actatagggtaaatacnngccctatttcaaagatttttaggggaattaattctaggacgatgggcatgaaactgtggtttgctccacagatttcagagcattgaccgtagtatacccccggtcgtgtagcggtgaaagtggtttggtttagacgtccgggaattgcatctgtttttaagcctaatgtggggacagctcatgagtgcaagacgtcttgtgatgtaattattatacgaatgggggcttcaatcgggagt

SEQ ID NO: 1383 - DNA, 565 bp, Homo sapien
  misc_feature (1)...(565): n = A,T,C or G
ggaaatttacctggcagcaagagacagccacagactcctaaggaaaaggctgaggctctagaggacctggttggcttcaaagaactcttccagacaccaggtcacactgaggaatcaatgactgatgacaaaatcacagaagtatcctgtaaatctccacagccagggtcattcaaaacctcaagaagctccaagcaaaggctcaagatacccctggtgaaagtggacatgaaagaagagcccctagcagtcagcaagctcacacggacatcaggggagactacgcaaacacacacagagccaacaggagatagtaagagcatcaaagcgtttaaggagtctccaaagcagatcctggacccagcagcaagtgtaactggtagcaggaggcagctgagaactcgtaaggaaaaggcccgtgctctagaagacctggttgacttcaaagagctcttctcagcaccaggtcacactgaagagtcaatgactattgacaaaaacacaaaattccctgcaaatctcccccaccagaactaacagacactgncacgagcacaaagagatg

SEQ ID NO: 1384 - DNA, 222 bp, Homo sapien; identical to SEQ ID NO: 1253

SEQ ID NO: 1385 - DNA, 530 bp, Homo sapien
  misc_feature (1)...(530): n = A,T,C or G
gtttctcatcaatctttcacctgatggttttagcagctattgataattgttgcctggatccattatttcatttcaggggttgtaaaatagtgattttctggttctatcaaacctcttgcatttatcatctatgattcttctttaaggaactttctctaaatctgaatgggaaagatgcgataaatatttatcaaattttagagtgagttagtgccctagcaacctccaaagttgacaaatgagtatttctttaaagcaaggtatggcccaaccaatactatgaaactagcatgtttagaatagagcaggaggaaactatatttgaaaggtcagaagtggaaagactaagagggcctgaacaataagaggacagaaccaagaggagttggcaactaattggatgtggggattaaggaaaggtaagcatcaaagattacctccaagtttgttagaaggttagtagcaggattctgatgccattcaagtaaatacaggtctcagtcagatgggcccnaggagccacatgtatt

SEQ ID NO: 1386 - DNA, 496 bp, Homo sapien
agaagctctatataaatccaagacaagcaacaaacccttgatgattattcatcacttggatgagtgcccacacagtcaagctttaaagaaagtgtttgctgaaaataaagaaatccagaaattggcagagcagtttgtcctcctcaatctggtttatgaaacaactgacaaacacctttctcctgatggccagtatgtccccaggattatgtttgttgacccatctctgacagttagagccgatatcactggaagatattcaaatcgtctctatgcttacgaacctgcagatacagctctgttgtttgacaacatgaagaaagctctcaagttgctgaagactgaattgtaaagaaaaaaaatctccaagcccttctgtctgtcaggccttgagacttgaaaaccagaagaagtgtgagaagactggctagtgtggaagcatagtgaacacactgattaggttatggtttaatgttacaacaactattttttaaga

SEQ ID NO: 1387 - DNA, 293 bp, Homo sapien
gtgtcttcaatggtttgttagttgccattacaactttgtctgggtagagtttttgagtttttgcagttcagtatccctctgtctattcacacttcgtgttagtggtaactcagtttgtctttaaatagttacagaagggatacgtcatttgttaatgcttttgtgaagtgagttaaacgagctttctgtattttaatgctttagtgtttcagttttataagtgaagattttattttaaaaaccagtgggaaagagtggggggtttctttttatgtctgggtcattcaggcagt

SEQ ID NO: 1388 - DNA, 497 bp, Homo sapien
  misc_feature (1)...(497): n = A,T,C or G
acaaaaaagcaccagcaactgataaaaattgcttttttgtgcgctacccaactggttaaagccaatgtgatcttttatggtgaaactcctaagaaacaggtggttttgctggaaacttggtagacccttaattatagtggtgctaatgagcactactgtaatataaagccaccattattnnttatcaaacatctgaatacattttacaaaggctattgtgagggcattattttgagcatctattttgaggtgatgtttaaaaaaactttaacatcaaatcaaattgtaaattaatttaaatatattgccttaaggacctactaaagaatgtgccaccagactttaagtgatagttgcaatatccttgtctaaaaaaaaaaaaaaagttgacttaaacattttctttaacagttgtcttttttttctaaattcagtctttctcttgcttttttttccctgctattgaggaagtattttgccttccctactcactgaga

SEQ ID NO: 1389 - DNA, 241 bp, Homo sapien
  misc_feature (1)...(241): n = A,T,C or G
acccactattattgngtttgttttatgccattattgattcttgatattcaagcatttacaatgtagcatatttgattttcttttttctttctttttttggcatcattaacatttcatttgaaatgcatattgntcttgaagtactttgtttttagcataaatgttgtgcattttatcttagtgtttggatgaaaacatttgtgttgnttagctttcatttgctttgtatatttaataatgt

SEQ ID NO: 1390 - DNA, 162 bp, Homo sapien; identical to SEQ ID NO: 1230

SEQ ID NO: 1391 - DNA, 506 bp, Homo sapien
accatggtaagaaacagttttaacagtagatcacgtatcagattgaatgataataaatttattgggaaatgagttagatttggacagtctgccatttttcaaaatcacagttgaaagacaatcaatcataggttgactgtaggagttgagcaaaaagcaattaagtatccttttaaaaaagcattttagttctttcctgagcaactaagtatactgtgagaatcaactggctatatgggatttacaataaagtatttgtatcttattatttgttaattgtgttatatgttcttgctatcagcaaaatttataacaaacatgtatagttgaatacataattttctcccagaagagtgaactgctaaacatttaccagcacaccactggattgggagaatggggagaaagggggaaatattttttaaaccaaagaaggaagtctgatgttttttcatttggtttttcagtttgccttcagcatccaactgccacagtgtgctttaagt

SEQ ID NO: 1392 - DNA, 270 bp, Homo sapien
actactgcagctgaccaatccaaagccagtttacactcagcatgtgttattctactttaaaatataaccttagtgaaagcacccttcaaatcaacagcaatctcacagtgagtttcctctgggtagtcaggatttgtccagaactacatccttttcagatgttcagagttttgcttgccattagggaggcaagggaaggatgagcaataaatcaggtttctcgttcgtatcttacttcttacctaattttctccctgttgcttatttggt

SEQ ID NO: 1393 - DNA, 157 bp, Homo sapien
acgtccatcttccagctgcttgccagcaaagatcagtctctgctgatcaggaggaattccttccttatcctggatcttggcctttacattttctatcgtatccgagggttcaacctcgagggtgatggtcttccccgtaagggttttcacgaaaatc

SEQ ID NO: 1394 - DNA, 331 bp, Homo sapien
actttggcctctctgggatagaagttattcagcaggcacacaacagaggcagttccagatttcaactgctcatcagatggcgggaagatgaagacagatggtgcagccacagttcgtttgatctccagcttggtcccctggccaaaagttcgaggggtttgtagagcttgcatgcagtaataaattccaacatcctcagtctccactctgctgattttcagtgtaaaatctgtgcctgatccactgccactgaacctgtcagggaccccggaggcccgaaaagaacccaaatagatcaggagctgtggagactgccctggcttctgcaggt

SEQ ID NO: 1395 - DNA, 534 bp, Homo sapien
acagtgtgatgttttgatacatgtatacattgcgtaataaccgaaccagggtaattagcatatccatcacctcaaatatgtgtcatttctttgtgttgagaactttcaaaatcctctcttctagctatttcaaaatatatgcaataggttattgttaactctagtcaccctactatgcaataaaacattagcacttatttaatgtgaagtttttaatacaaaaattattttaagaaaataagcacaggctgggcgccgtggctcacgcctgtaatcccagcactttgggaggccgaggcgggtggatcacctgaggtcagaggttctagacgagcctaaccaacatggggaaaccccgtctctactgaaaatacaaatttagccaggggtggtggtgggcacctgtaatcccagctacttgggaggctgaggcaggagaattgcttgaatctgagaggtggaggttgcagtgaaccgagatcgtgccattgcactccagcctggggaacaagagcaaaacttcatctcaaaaaa

SEQ ID NO: 1396 - DNA, 358 bp, Homo sapien
  misc_feature (1)...(358): n = A,T,C or G
accattcagttcagctgcaggtataggcagtgacaagtatctaattcttagaagaatcacttactcccacaatctgtccagacacattaatctaaggacaagtttataaatagcaaacgtgattttcacattgcagtgttctcaagaatgtatatacaagtgtgtagtcctgttgatgggatgtttccccgagttctttctattgatgcgttcatgctcttgaccctggtagagacagttctttctttccacagagcanattttcttttgtcatccaccatttacaatactctgtgaattagtattacttattacatttatgaaacggcaatatttggattgttaatanctcttcagt

SEQ ID NO: 1397 - DNA, 497 bp, Homo sapien
acacctttaggatgctataaaaaactaatagaatatcataagaatggacacctttcttttaaatatgtgaagacctttaatatggatgaatatgtaggacttccaagaaatcatcctgaaagctaccattcttatatgtggaataatttttttaagcatatcgatatagatcctaataatgcacatatccttgacgggaatgctgcagatttacaagcagaatgtgatgcttttgaaaacaaaataaaagaagctggaggaatagatctttttgttggagggtttggttaataaaaactctaagaactgtgccaaatgggatcaaaatatcagctttattaaaggaattggtccagatggtcatatcgctttcaatgagcctggatccagtttagtgtcaaggacaagattaaagactctagcaatggataccatcttggcaaatgccaaatattttgatggagatttatcaaaagtgccaactatggctctaactg

SEQ ID NO: 1398 - DNA, 146 bp, Homo sapien
acaaaactgtatttacaagaaaaccaattaaaaattaagggtgtgtgcaaaagtagacaggagagtcaagacatatcaatgcagggatggctttggggaatgggggactcaggttctacactggaacctggggtcatgtatcatgt

SEQ ID NO: 1399 - DNA, 146 bp, Homo sapien
  misc_feature (1)...(146): n = A,T,C or G
acctcagccccanntggtggcccgggaaccctggatgacagtgccaccatttgccgtgtctgccagaagccaggcgatctggttatgtgcaaccagtgtgagttttgtttccacctggactgtcacctgccggccctgcaggatgt

SEQ ID NO: 1400 - DNA, 122 bp, Homo sapien
actgggattacaggcgtgaacccccgcgcctggcctgcttttctttttttaagactagctcttctaatgactaacagtgtcaaattgagcaagtacaagctttttttttttttttttttttt

SEQ ID NO: 1401 - DNA, 499 bp, Homo sapien
acaaaagtgcttagtcaggctctaaatggagactcagactctgaagatatgttgaattcagaacacaagcacaggcataccaatattcacaaaatagatgcaccttctaaaagaaaaagttcctctgttacatcttcaggagaagattcaaaaagtcatattccagggagtgagactgataggacattttcttcagagtcaaccttggcacaaaaagctactgcagagaataattttgaagtggaactgaattatgggctgcgcaggtggaatggtagaagactcaggacctatggaaaggctccttttagtaagacaaaagtgattcatgattcacaggaaacagcagagaaggaagtaaaaaggaagagatcgcatcctgaattggaaaatgtgaaaatctctgaaacaactgggaattcaaagtttagacctgatactagttccaaatcatcagatttgggatctgtaactgaatcagatattgactgtacctcgg

SEQ ID NO: 1402 - DNA, 425 bp, Homo sapien
  misc_feature (1)...(425): n = A,T,C or G
actgggggaactgatgggggaactttcatcctgttaggaactccgctttccattcctgggtctctgtcttgctccctggagatggatggatcacggagggggccacagtcagctggggcaacaggtacgaataggagctcagcaggcagacgaatgaggaataaaggtcagagaaggtcagagctgagtgacgtttggaatccaccccgtttattgtagaactgggggttcagagggcaggtgcctcagagttgaggccacacagtgaggtctggtgggtgaaaggacccangaacgaggcgttcaggaaagcaggttgtcagagctatgtggagtctgtgggtggcaggggcagccgctccagcctttgaagactttgaaagccagagattcctggcgcangcttggacttnctgggagctnct

SEQ ID NO: 1403 - DNA, 315 bp, Homo sapien
accaatttttagaaacatattgtcttctcagattgaagtggagggtccagaaatgcaacacccagcattctttaaagaaaataatagctagaatctttctgatacagattccaatatagattccattattcaaagtcctccacaaattactgggaaaatgtaagaggtaacttcacaaaaatcacatattgagtggaataattataactgatatataaataaggatttactaaaaaaaggcttcaaggggtgatattttaaatcaaggttttaaatacaaaaggtgtcttgtgttgcttaatcatacagtttcgt

SEQ ID NO: 1404 - DNA, 336 bp, Homo sapien
  misc_feature (1)...(336): n = A,T,C or G
acaccacctccaaaaataaaaaatggaaaacacacctttagtgaagtagaagtatttgagtatcttgatgcagtaacttatagttgtgatcctgcacctggaccagatccattttcacttattggagagagcacgatttattgtggtgacaattcantgtggagtcgtgctgctccagagtgtaaagtggtcaaatgtcgatttccagtantcgaaaatggaaaacagatatcaggatttggaaaaaaattttactacaaagcaacagttatgtttgaatgcgataagggtttttacctnnatggcagcgacacaattgtctgtgacagtaacagt

SEQ ID NO: 1405 - DNA, 446 bp, Homo sapien
  misc_feature (1)...(446): n = A,T,C or G
acaaattctgagctgtctaacccctctgaaacggaatctgagcataaagacgagctgagtgattgatcattggcaggagaagatgatcgagacagccgacatcagcgtgacagcaggagacgcccaggaggaagaggcagaagtgtttcagggggtcgaggtcgtggtggaccacgtggtggcaaatcctccatcagttctgtgctcaaagatccagacagcaatccatacagcttacttgataatacagaatcagatcagactgcagacactgatgccagcgaatctcatcacagtacctgcccgggcggccgcccgggcangtacctggtgggtctgttcgaagataccaacctgtgtgccatccacgctaagagagtcaccatcatgcccaaagacatccagttggctcgccggatacggggagagagagcttaagtgaaggc

SEQ ID NO: 1406 - DNA, 272 bp, Homo sapien
acagcctggagggtccctgacactctcctgtgcagcctctggattcacgttcagaaattttccaatgaactgggtccgccaggctccggggaaggggctggaatggatttcatacattagtggtagtggttctaccatatactacgcagactctgtgaagggccgattcaccgtctccagagacaacgccaagacgtccctgtttctgcaaatgaacaacctgagagccgaggacacggctgtttattactgcgcgagggcccccacatggt

SEQ ID NO: 1407 - DNA, 412 bp, Homo sapien
  misc_feature (1)...(412): n = A,T,C or G
tttttttttcgcaaagattcactttatttattcattctcctccaacattagcataattaaagccaaggaggaggaggggggtgaggtgaaagatgagctggaggaccgcaataggggtaggtcccctgtggaaaaagggtcagaggccaaaggatgggagggggtcaggctggaactgaggagcaggtgggggcacttctccctctaacactctcccctgttgaagctctttgtgacgggcgagctcaggccctgatgggtgacttcgcaggcgtagactttgngtttctcgtagtctgctttgctcancgtcagggtgctgctgaggctgtaggtgctgnncttgctgtcctgctctgtgacactctcctgggagttacccgattggagggcgttatccaccttccactgt

SEQ ID NO: 1408 - DNA, 189 bp, Homo sapien
actgcaaagacacaaaatcaaaagcaacggaaaaaatagaaatacttaaagtgtggcaatactctttcacttaattctttacaagggatatcaaagccataatggacttcattagttttagggtagggaagggatactaattacttatttctttcaaaacatttttggtttttggtttttaaaattttt

SEQ ID NO: 1409 - DNA, 263 bp, Homo sapien
ttttttactgtgaatatatactttttatttagtcatttttgtttacaattgaaactctgggaattcaaaattaacatccttgcccgtgagcttcttatagacaccagaaaaagtttcaaccttgtgttccacattgttctgctgtgctttgtccaaatgaacctttatgagccggctgccatctagtttgacgcggattctcttgcccacaatttcgcttgggaagaccaagtcctcaaggatggcatcgtgcacagctgtca

SEQ ID NO: 1410 - DNA, 356 bp, Homo sapien
actgctgctgccttttcaccgaggcactgccaccaccagctctagcagggatgctcctgagcttggcggacatacttagatcctaacgtgccagtgagacctggctgtggagagtagcactggcagccctgcctggactccacttggcatgataccagctccagaagggaagggagtggagcaggcagtgaggagagagcctgggggtcggctggggacagccgtatgtgctaggtaggagtggagggagatatgtttaccaaatgcctgtcctgccatcctcccaggtagtcagagtgagctacatcctgccccgccttcatttccatggaaacatggcagctaggacacggggt

SEQ ID NO: 1411 - DNA, 256 bp, Homo sapien
acgcttggagcgacctttggctacgtggctggccttgttatttcaccactctggatatactggaatagaaagcaacttacatacaagaacaattaactggagcaaagggagatatttctttgtgcagattctgtaagggctgggcagaaatgtgtatggtcaaagccaagcagttccatttacagctctgttttttacgtagttacaacatgatgtgattgtagctttttaaactatgaaacccctgagagattgt

SEQ ID NO: 1412 - DNA, 224 bp, Homo sapien
acttttgaacaaccacacacaattcatcaagcacacacactcactcctgctcctctcacacacggccaccagagcagctcccctagttctcttgttcctcatagtgagcatagccactagcataggtccttcctaaattcaaattagtaaacaaatctgatgactcagtatctgaatcctttctgccttcatcttcttcctcttcatcatcctctgcttcatac

SEQ ID NO: 1413 - DNA, 394 bp, Homo sapien
  misc_feature (1)...(394): n = A,T,C or G
acgcgaaattgtgttatgactgatagccttcagctacaaaaagataggactgacctggtttaaagtgttctattttgtaaatcattccatttgagtctttctgatgaacttggctatactgaaatctgttattttagtgaggctccaaaatgagcaaagctaggcctgattagagtagagtgactattaaaaaacataactttctaggagctataaatcaaagttttaaaaagatgtttggatatatttgagtattccgatcatgaaaacagaaattgccctgcctactacaaggacagactgatgggaaattatgcacctggtcaacttagcttttaagcagacgatgctgtaaaaactaacggcttctctgatatttattgnaagttttagt

SEQ ID NO: 1414 - DNA, 489 bp, Homo sapien
  misc_feature (1)...(489): n = A,T,C or G
actctgaggcttgtaggagggtaaaatagagacccagtaaaattgtaataagcagtgcttgaattatttggtttcggttgttttctattagactatggtgagctcaggtgattgatactcctgatgcgagtaatacggatgtgtttaggagtgggacttctaggggatttagcggggtgatgcctgttgggggccagtgccctcctaattggggggtaggggctaggctggagtggtaaaaggctcagaaaaatcctgcgaagaaaaaaacttctgaggtaataaataggattatcccgtatcgaaggcctttttggacaggtggtgtgtggtggccttggtatgtgctttctcgtgttacatcgcgccatcattggtatatggttagtgtgttggttagtaggcctagtatgaggagcgttatggagtggaagtgaaatcacatggctaggccggangtcattangagggctganagggcccctgtta

SEQ ID NO: 1415 - DNA, 339 bp, Homo sapien
  misc_feature (1)...(339): n = A,T,C or G
ttttttttttttttttggttcagtctaatcctttttgtagtcactcataggccanacttagggctaggatgatgattaataagagggatgacataactattagtggcaggttagttgtttgtagggctcatggtaggggtaaaaggagggcaatttctagatcaaataataagaaggtaatagctactaagaagaattttatggagaaagggacgcgggcgggggatatagggtcgaagccgcactcgtaaggggtggatttttctatgtagccgttgagttgtggtagtcaaaatgtaataattattagtagtaaggctaggagggtgttgattatta

SEQ ID NO: 1416 - DNA, 185 bp, Homo sapien
cgacagcttgagtctcattgttcaggactagcctaggcaacatggcaaaaccccgtctctacaaaaatttttttaaaaattagccgggcatggtggcgtgcgcccgcagtcccagctacctggaaggctgaggtgggaggatggcttgagcccgggaggtagaggttgcagggagccgagactgt

SEQ ID NO: 1417 - DNA, 456 bp, Homo sapien
acaattaaaaggtcatctatctcataactgacggctcaggtctgtccagttgccataattgcacaactggattccagctgctggtaataaggaattgtgtagatagataaagggcaagagtatgtctgcaatccaaaataaatgagagttaacacataattagccttttgattattttggcagctatcctcaccatttagtaaagggtatactaacaatacccaactttatttaacaaagttttgtaagcatacctaagtagtaacttgatatgctgaaaaatctgacctgtcacttcgcttcactctgaccagtaattgcagattgtcgtcaccatcctagcctatgactacattaggattttatgacttattaacttgaaaatctgttctgtaagtggcattggtagaatctcccactttgctcctcactgtccaattgtgtaaagattaaggt

SEQ ID NO: 1418 - DNA, 238 bp, Homo sapien
  misc_feature (1)...(238): n = A,T,C or G
acagaaaacattanaaaaaatttattacagaattctaattccagtatgaatagtggaaacccatctgtaaattagatggatgttggatggaaaatgacattgctaaatttgagaatttctttttacctactaatgtagattgctttgtataataaaacacagggtttggaaggttttgttacagggagcatggtctgttgaagatttttaaaatgtatttttctagattaacttctgt

SEQ ID NO: 1419 - DNA, 386 bp, Homo sapien
acatgaggccaaggtgaactgtgcatcctgagaccttgtgtccctgagtctcctttctgagtgcaagctgcactgtgagctggctgtgggatactcacacattcccacattctcctttctgccacatctcgcccttctggacctgcactgggagaaattcaggacaggagtgaactcaaggccatgaactcactggatttccatttttaggcacccatagggatgtttttaggatgtaagtttctgaggagaaagctagctctagcatgaagcttttttggattggcttctccatcgtgttggggtaacattttttttccaattttttttttcccaaaacatcgtctcagctcatttatcaagtaggtaaaatgagccttttgtgt

SEQ ID NO: 1420 - DNA, 392 bp, Homo sapien
  misc_feature (1)...(392): n = A,T,C or G
acaagctttttttttttttttttttttttttcctttnatcaaagtcttttagtgtactgtacactaaataaaatacacaaggcagcaatacttaggggccanaaacactgcttactacaagtcagttacggaatcataatttacagtaaaaatgggcacgtcccaaggctcaatttttctttttcttttgncatttacagtanaataaatattttgttgctattgctacactttaatttacattctaacctattaaatgcanaaagctagtgtaaagcatatagattaagtgtaggtcccatacgtatgacagtttgttcaaaactagtaggtttttgtttttgtatctttttttaacttattaaatggntagngggaaanatttgtgcttg

SEQ ID NO: 1421 - DNA, 368 bp, Homo sapien
acaaacaatgtttatttgtttgtaaagtgccaggtttatatttaagtaaacattaaaatctgcgttgaagcagtgaggctgcatcttttaactggctgtgctggttaaaggactgtttaatcccgctgtgctaagctcactaaagggtcacccctcactttaaagccaagactgccattgtcactgctatggtaagtcacagccagccaggccttctggcaaaaggtgatactaccagcactataaacagacaggactggttgtgaggtagctacacagttttaaagatgctgttaatgaacattacggacaattcatggtgtggctagttggtaacacttcagctgatttttcttatgagatggaaa

SEQ ID NO: 1422 - DNA, 245 bp, Homo sapien
  misc_feature (1)...(245): n = A,T,C or G
actgcaatcacaatgccnnatggtgtttatgggctatttgtgtaagtaagtggtaagatgctatgaagtaagtgtgtttgttttcatcttatgaaaactcttgatgcatgtgcttttgtatggaataaattttggtgcaatatgatgtcattcaactttgcattgaattgaattttggntgtatttatatgtaattatacctgtcacgcttctagttgcttcaaccattttataaccatttttgt

SEQ ID NO: 1423 - DNA, 583 bp, Homo sapien
  misc_feature (1)...(583): n = A,T,C or G
actaccccaaataactttcttattgctctgaaagaagaaaagcaatgtaaatcactatgattattgcgcaaacaaccagaattctccaacaattttaagtaatctgatcctcttcttggagaaaattgttacctaatagtttttccttatgaatgttattactactggtataaatcaaatttctataaatttcctacttaagtcttaagaactgggttcttcctttgatgttattcatgttcagaaaggaaacaacactttactcttttaggacaattcctagaatctatagtagtatcaggatatattttgctttaaaatatattttggttattttgaatacagacattggccccaaattttcatctttgcacaatagtatgacttttcactagaacttctcaacatttgggaactttgcaaatatgagcatcatatgtgttaaggctgttatcatttaatgctatgagatacattgttttctccctatgccaaacaggtgaacaaacgtagttgttttttactgatactaaatgttggctacctgngattttatagtatgcacatgtcagaaaaaggcaag

SEQ ID NO: 1424 - DNA, 351 bp, Homo sapien
actgtgaggttgcaccttccattatttgagtgcctggaaggattcctctgatgcattcattcagaaatggcatccactgggagacccagggaaaggagagagcaggctgctgggctcagctgcagcaactttgggaggggctaggggcatgagatacggaccaggatatttttttaccttctagagagcacagggcacatagcagccaggctgcaacaaatatgactcccacacactgctcttttgccattcacaaataccactttttaaaacaatacaaggctcattccacagaaggtaaatgaaagaaaccccactctccaagttctcaaaatgggattgctctcaagt

SEQ ID NO: 1425 - DNA, 157 bp, Homo sapien
ccgggctgctgataaaagaagtaaggctttgaaagcttcagcgcctgctcctggtcatcactaaccagatttacttggagtacatgtgaaagaaaacgtcagtctgcctgtaaatttcagcaagccgtgttagatggggagcgtggaacgtcactgt

SEQ ID NO: 1426 - DNA, 509 bp, Homo sapien
acccagacaaaacccggccacgtgtaagtcagatgctgattttgactccatttcaaggtcaaggccatggtgctcaacttcttgaaacagttcatagatactacactgaatttcctacagttcttgatattacagcggaagatccatccaaaagctatgtgaaattacgagactttgtgcttgtgaagctttgtcaagatttgccctgtttttcccgggaaaaattaatgcaaggattcaatgaagatatggcgatagaggcacaacagaagttcaaaataaataagcaacacgctagaagggtttatgaaattcttcgactactggtaactgacatgagtgatgccgaacaatacagaagctacagactggatattaaaagaagactaattagcccatataagaaaaagcagagagatcttgctaagatgagaaaatgtctcagaccaggaagaactgacaaaccagatgaaccaaataggaaataagcatgcaacatgaacagctgg

SEQ ID NO: 1427 - DNA, 519 bp, Homo sapien
acttgaaacttagctctctatcctgaaagttgaagttagggttctttgatcctggtgagatgttaattgtaattttaattttcatatgttaatattgtgacttgtattttgtgatgagtctctagaatgattaaatgactatttttttatgaaaaattttttgttaataaaatatctgagggtattttgagtatgtggaaggaatgcctgaatagaagctgatctatcttaacatacctcaagaactccagttttaatatggtgagtgaggagttgactggaaaaaggagagatccaattcttgttctagtccttggcacatacactctctgggttttgagaaaaggatggtcctacaacgattctaagttgttttctcattggtcctacaacaattctaagttgttttctcaaaggcaaaagcatgatttcaaaatgacatcacttgtcagattttctggtgtatggaaagatttaataaatcctgcctcttttgaagcctgaaacttacaatttaaa

SEQ ID NO: 1428 - DNA, 484 bp, Homo sapien
  misc_feature (1)...(484): n = A,T,C or G
actgggcgggtgaaacgattaccacccatagtgcgaggaggagccatcgacagatactggcccaccgccgacgggcgcctggttgaatatgacatagatgaagtggtatatgacgaagattcaccttatcaaaatataaaaattctacactcgaagcagtttggaaatattctcatccttagtggggatgttaatttggcagagagtgatttggcatatacccgggccatcatgggcagtggcaaagaagattacactggcaaagatgtacctgcccgggcggccgcccgggcaggtactcccgattgaagcccccattcgtataataattacatcacaagacgtcttgcactcatgagctgtccccacattaggcttaaaaacagatgcaattctcggacgtctaaaaccaaaccactttcaccgctacacgaccgggggtatactacggtcaatgctctgaaatctgtggancaaaccacag

SEQ ID NO: 1429 - DNA, 327 bp, Homo sapien
  misc_feature (1)...(327): n = A,T,C or G
ttcgcgagagcctanagccagatgcctatgcgttgttccataagaagctgaccaagggtgtgctgatgcgggaccccaagttcttgtggcgtgcccagtgctcctttggcttcatatatgagcgtgagcagctggaggcaacttgtccccagtgtcaccagaccttctgtgtgcgctgcaagcgccagtgggaggagcagcaccgaggtcggagctgtgaggacttccagaactggaaacgcatgaacgacccagaataccaggcccagggcctagcaatgtatcttcaggaaaacggcattgactgccccaaatgcaagttctcgt

SEQ ID NO: 1430 - DNA, 507 bp, Homo sapien
ctgtcaaatacatttcagttcactaatgaagcccgagaaatgggtgtgattgctgccatgagagatggttttggtttcatcaagtgtgtggatcgtgatgttcgtatgttcttccacttcagtgaaattctggatgggaaccagctccatattgcagatgaagtagagtttactgtggttcctgatatgctctctgctcaaagaaatcatgctattaggattaaaaaacttcccaagggcacggtttcatttcattcccattcagatcaccgttttctgggcacggtagaaaaagaagccactttttccaatcctaaaaccactagcccaaataaaggcaaagagaaggaggctgaggatggcattattgcttatgatgactgtggggtgaaactgactattgcttttcaagccaaggatgtggaaggatctacttctcctcaaataggagataaggttgaatttagtattagtgacaaacagaggcctggacagcaggttgcaact

SEQ ID NO: 1431 - DNA, 213 bp, Homo sapien
acatgctttctttgcatctggcacctgagcaccaaggctgctgagtcccacgatggagtagaaggcagattccaaatttgtgaaagggcgatccagcgaggcttttagtctctccacgtcatgcttggtgaggtagtgagtgggcgtcagagcccaggtgctggctatgattgtcagggccaacaggaagacagtgcttgaacccggcggcgc

SEQ ID NO: 1432 - DNA, 250 bp, Homo sapien
actatagggtaaatacgggccctatttcaaagatttttaggggaattaattctaggacgatgggcatgaaactgtggtttgctccacagatttcagagcattgaccgtagtatacccccggtcgtgtagcggtgaaagtggtttggtttagacgtccgggaattgcatctgtttttaagcctaatgtggggacagctcatgagtgcaagacgtcttgtgatgtaattattatacgaatgggggcttcaat

SEQ ID NO: 1433 - DNA, 580 bp, Homo sapien
  misc_feature (1)...(580): n = A,T,C or G
acacttgaaaccaaatttctaaaacttgtttttcttaaaaaatagttgttgtaacattaaaccataacctaatcagtgtgttcactatgcttccacactagccagtcttctcacacttcttctggtttcaagtctcaaggcctgacagacagaagggcttggagattttttttctttacaattcagtcttcagcaacttgagagctttcttcatgttgtcaagcaacagagctgtatctgcaggttcgtaagcatagagacgatttgaatatcttccagtgatatcggctctaactgtcagagatgggtcaacaaacataatcctggggacatactggccatcaggagaaaggtgtttgtcagttgtttcataaaccagattgaggaggacaaactgctctgccaatttctggatttctttattttcagcaaacactttctttaaagcttgactgtgtgggcactcatccaagtgatgaataatcatcaagggtttgttgcttgncttggatttatatagagcttcttcatatgtctgagtccagatgagttggtcaccccaacctctggagagggtctg

SEQ ID NO: 1434 - DNA, 168 bp, Homo sapien
  misc_feature (1)...(168): n = A,T,C or G
acagccccagtctttgcaatttatcatcgatgcgtttaagggacaggtatttgccttatccacacatccttatggctgccgagtgattcanagaatcctggagcactgtctccctgaccagacactccctattttagaggagcttcaccagcacacagagcagcttgt

SEQ ID NO: 1435 - DNA, 565 bp, Homo sapien
acacacatgttctcatatatgtatatatacatacatattcatatatgtgtatacatatatacatatgaaacaagtttttaaatgttggcagcatattttcacaactgcaacctaaacaaccactggaagtgggggtccacttaagttttgtttgccattagcttaataggggaaagctattttaattttccctgcaactttttggatatgagttatgatctcaaaatgtcatttaactattgcactaaaaagtaatttgaccttggaactcctttctagatggaaggagaataaagacatctgtagcatgtaattctatttttatttcttgactacataacctagcagtggtctaatactgaccgtttcaatttaaatgctggaaaaatactgaccaagactttctgtgaaaaagataatggaaaacagaaaccagttagtaaagccatgcaaataggaagtgattttcagccccaagaggactttgtatcatctatggctccatttaaacccaaagtagcatccgtcctggtggattttgaacatccttttgatttaacacaga

SEQ ID NO: 1436 - DNA, 361 bp, Homo sapien
actttccaaaagctaagggatgaaagaaaatctactgtttatcggccataaggttatatactgtttcttagcaaccagggtttgtctttcagagactagaagtcgatgaaaaaggagagactaaaaataaaaccatctggacagttccaattcacagaggcagcacttcaaaggcagtgatgttgtgataaaccatactgttgagttaaagttcattccattggctagaaagagaggctcatgacacttgcttaataaatgtttcccggatactcactgcagtccctgaaccaaagaccaggaataaaagctacctatctgttcctgcatagagcacatatcaacatcagggatgagaggt

SEQ ID NO: 1437 - DNA, 321 bp, Homo sapien
gacagattggaagtggggcaacctcagttgtcagggaatctgccagggcaggcggatggaagctggtcgtgcaagcctcatgagctttctgttttgggaggccattttgagctttctgttctgaaaccctgggagccatcgctggggcctaagaagggacgagactctccaggtctgagatggaaaaatcaccctagaaaaataccaactcagaaaataaaaagcagaaagcaactgtatttcaggtttgagaacctacttagaattttaaaagtcatcttgaaaatgtaagtttagaataatttattagggttttattgt

SEQ ID NO: 1438 - DNA, 406 bp, Homo sapien
acagcaattgtagtaactgacacatcctctctttgcaagctgctgactgggcacactcatgccaagtttcagaattattggtcttctgggtttttgctttttaaaagaggtgtgggagcagaggaatggaaacaatcgtgagtttttgagctagggaaagttggagctcctttaatctttttaaaggatcagtgctgccctaagtgaataaactcaattgtccatctttattttagagttttaatgaattcaaggaagggagcatagcatatctgtggcaaactattttccactcaaatcctgagttattgctgcatgctttaatttcttccctttcagcatctgagaaccttaaagccaatgtctgcgatctttttttagatatttatacttttagatatatagt

SEQ ID NO: 1439 - DNA, 257 bp, Homo sapien; identical to SEQ ID NO: 1267

SEQ ID NO: 1440 - DNA, 181 bp, Homo sapien
acagagattgctttttaatggatttctataagtagtattaataggaaaaagcatataatacaatctactctgtatctaagagctttaatttattcaaatattggaagaaattcatcttctgaatttttcttatttaaaaagcattatgagaactgattcaaggatggaggaatcaattagt

SEQ ID NO: 1441 - DNA, 181 bp, Homo sapien
acaacaaagactatttacaatgcaaaaagtatataaaccacaatttaacagtctgctactggcagccactatagtttaggaggtagctttaattaaacgaaatgaacagaagccacatttcccaacttgtgttctaaaaataatttacataagataaaaattcattatatacacagtatgt

SEQ ID NO: 1442 - DNA, 444 bp, Homo sapien
  misc_feature (1)...(444): n = A,T,C or G
accgcggccgttaaacatgtgtcactgggcaggcggtgcctctaatactggtgatgctagaggtgatgtttttggtaaacaggcggggtaagatttgccgagttccttttactttttttaacctttccttatgagcatgcctgtgttgggttgacagtgagggtaataatgacttgttggttgattgtggatattgggctgttaattgtcagttcagtgttttaatttgacgcaggcttatgcggaagagaatgttttcatgttacttatactaacattagttcttctatagggtgatagattggtccaattgggtgtgaggagttcagtttatatgtttgggatttttttaggtagtgggtgttgagcttgaacgctttcttaattggnggctgctttttangcctactatgggtgttaaaattttttactctctctacaang

SEQ ID NO: 1443 - DNA, 473 bp, Homo sapien
gtggtgttgagctgattattaacagttactgaaatcaaatatttatttgttacattattccatttgtattttaggtttccttttacattctttttatatgcattctgacattacatattttttaagactatggaaataatttaaagatttaagctctggtggatgattatctgctaagtaagtctgaaaatgtaatattttgataatactgtaatatacctgtcacacaaatgcttttctaatgttttaaccttgagtattgcagttgctgctttgtacacgaacttgctccaacagtgctgaaattcgtcataattcatgatcttcatggtggcacgcggaccgtctcttttctgacacaggctgcgaagcgcctcctggtaatctgggtcccagaagtagtagaggcgggcaacaaagatggtcagggtaaccttcgggtcctcggccaggaacgtggccatatcccttgc

SEQ ID NO: 1444 - DNA, 289 bp, Homo sapien
gcgagtaagatggaagatgaggaggtcgctgagagctgggaagaggcggcagacagcggggaaatagacagacggttggaaaaaaaactgaagatcacacaaaaagagaggaaatccaaatctcctcccaaagtgcccattgtgattcaggacgatagccttcccgcggggccccctccacagatccgcatcctcaagaggcccaccagcaacggtgtggtcagcagccccaactccaccagcaggcccacccttccagtcaagtccctagcacagcgagaggccgagt

SEQ ID NO: 1445 - DNA, 385 bp, Homo sapien
  misc_feature (1)...(385): n = A,T,C or G
caattatcatgtttataaggttgggtgggctaggtaagatgatgtagagggtgacattaaagtgtagaacagagaccacttaggtggaagcaggcagccttggactttgctaaagaccagtccatgtgactgacatggggtcacttcaaatggtagtgcctccctcactgaagagcatcagaagggcttctgagcaaggccagaatgagcctcgatgaacatccaagttgaccaaccagtgtggtgcctaacagaggacagagccaccagcaggggtgctcaggggctgctccccttttattaatgacagcggtttctctcaaggaagtgtagtgccctcccctttgggatagttgcctgacccctgtccatcagnccttcaagt

SEQ ID NO: 1446 - DNA, 572 bp, Homo sapien
  misc_feature (1)...(572): n = A,T,C or G
accagaagaccttannaaaaggaggaaaggaggagaggcagataatttggatgaattcctcaaagaatttgaaaatccagaggttcctagagaggaccagcaacagcagcatcagcagcgtgatgttatcgatgagcccattattgaagagccaagccgcctccaggagtcagtgatggaggccagcagaacaaacatagatgagtcagctatgcctccaccaccacctcagggagttaagcgaaaagctggacaaattgacccagagcctgtgatgcctcctcagcaggtagagcagatggaaataccacctgtagagcttcccccagaagaacctccaaatatctgtcagctaataccagagttagaacttctgccagaaaaagagaaggagaaagagaaggaaaaagaagatgatgaagaggaagaggatgaagatgcatcagggggcgatcaagatcaggaagaaagaaggatggaaacaaaaggactcagcaggatgcttcatggtcttcagcgtgctctttgctaaaaactggagctgaatctatcagtttgcttganttatgtcg

SEQ ID NO: 1447 - DNA, 228 bp, Homo sapien
actgtgagggatagacaagcctccatccacagctcccttcagggcaccaaaaactttattgccagtggtagttctggcaaggcctgcatccaaatagcaggtgaaggcacctggctgaccatcaatgctttccacattgtattcatcaccagtcacctccacttggccttcatagatcttgtccatgccaaacctattgagaagcctgcgggccagcagcaggccagt

SEQ ID NO: 1448 - DNA, 333 bp, Homo sapien
  misc_feature (1)...(333): n = A,T,C or G
ggtggggcagcacacctctggggggataatgtccccactcccgaaagcctttcctcggtctcccttccgtccatcccccttcttcctcccctcaacagtgagttagactcaagggggtgacagaaccgagaagggggtgacagtcctccatccacgtggcctctctctctcctcaggaccctcagccctggcctttttctttaaggtcccccgaccaatccccagcctangacgccaacttctcccaccccttggcccctcacatcctctccaggaagggagtgaggggctgtgacatttttccggagaagatttcagagctgaggctttggt

SEQ ID NO: 1449 - DNA, 606 bp, Homo sapien
acattgctttgacttaaaaattgaagtccattattctgaccgaaagttaatctgatgattaattggttaaacatactatcgttgctaattagcataattattatttacaataaagtgagctaaatagctacaactaaaatatatttaaattactgtgatattgtgatgctaaagatgtgttgaaattaatatcttgaatttctcaaccctgcctaaatgcctctgagagtaattagtataattaaaagtcactagagaaagtgaatgactctaataacaggataacaaattcttttcaagtcagatggtttccagttctttgctttcaacaaaattaatggtggcccatgaattgtcagctgatgaaggaacactatttggtttttggcatgcaactcggaaagaaaccaaacgattgattgacatgcttacaacaaaactactagcattctcacctatttatgtaaaaccatttctcagcacttgtatctgtgaaaacaacagaattgaaaatgaaccctgttaatctaccagtaggaactattcatccagataaaatgaattaattggtgggtcagccccatctatctcactaagagatgtgtt

SEQ ID NO: 1450 - DNA, 536 bp, Homo sapien
  misc_feature (1)...(536): n = A,T,C or G
gctttaaaataatagaccttacaaagnnttctagacagacttcctgtgaagaacaaggagcagggggaaaggggaaggggtagaatttaccaatctgaatatttcancaagggagaatgcatgagttttactataaaaccacactgaacattgcaacaatactaaattccatacatatataataatcactgagctataaggttgctgatgtatttgttcttgaaagtgaattagagttactttatgcagaatcagctagttttatgtttcataatgtctttcccttttttgaacttttttttaagtctaaagtagggggaaccaagcctgctggtggtgattttggagaagtcttgaattcggctgcaaatgctagtgccaccaccacggagcctcttccagnaaaagacacaggagagcctgtgagattcctacctttgttctgctacccactgcnagatgctgcaaagcgaggcccaagcanatcttgtcaaacangcattgccatgaaatttctaccagatgtgcttttattt

SEQ ID NO: 1451 - DNA, 314 bp, Homo sapien
  misc_feature (1)...(314): n = A,T,C or G
cagtgccctgccagtagctcctagagaggcaggggttaccaactggccagcaggctgtgtccctgaagtcagatcaacgggagagaaggaagtggctaaaacattgcacaggagaagtcggcctgagtggtgcggcgctcgggacccaccagcaatgctgctcttcgtgctcacctgcctgctggcggtcttcccagccatctccacgaagagtcccatatttggtcccgaggaggtgaatagtgtggaaggtaactcagtgtccatcacgtgctactacccacccacctntgtcaaccggcacacccggaagt

SEQ ID NO: 1452 - DNA, 520 bp, Homo sapien
  misc_feature (1)...(520): n = A,T,C or G
acacacacatggggaacacaccacagcttagatgtgacaaagttccttctcatatgactgttccctcaaggtaagactaagatgggagggggagaaaaagaatcctaaaaagccaatttttaaaaattctgctttggctgattttgtgctataatgggtagctgatttctaaaaatcatatttcttcaaagagttttatatcgaaaggaagactaaatgtaatgtgcctttccttataatccaggaaaacaactgtggtatttcaaaaattctaaaaatatctactttcatgaaatagtaactatttcactacaaacctatttttcactaaatacacacatttcctaatcctggagcctcctgggaaaagcagtgggttctccctgggtcttgcaagactccagtgtttcacaggagagtgtggggaatancttcaccccgtctcctgggatgggctttgtcagaggtcacgtgcagagacgctatcagacttncaccaggcatgtttaagcaattaccc

SEQ ID NO: 1453 - DNA, 470 bp, Homo sapien
  misc_feature (1)...(470): n = A,T,C or G
acatcgaccgcattgccatacctgatgcctctaagctgcaattcatcctagcagaggagcagtttatcctttcccaggttgcactcctggagcaggtgaatgccttggtgcccatgctggacagtgctcacatcaaagccgttcctgagcatgctgcccgcctgcagcgcttggcccagatccacattcagcagcaggaccagtgtgtggaaatcactgaggagtccaaggctctcgtggaggaatacaacaagactacaatgcttctctccaagcaattcgtgcagtgggatgagctactttgccagctagaggccgccacgcaagtgaagccagcagaggagtgatagctgctccccatcccaaggtgggcctgggcagtcaggctccagggccctatgccaacctgcctttgttacaaggcaggaggaagctttgtatttattggcttcaangcccacctctctgta

SEQ ID NO: 1454 - DNA, 297 bp, Homo sapien
  misc_feature (1)...(297): n = A,T,C or G
actcagggttctgaatcactgggggttcccactctccgtccatctcttcatcccagtcctcgggcttcttagcatcagggtcggggatatgctcgggcttgtcccagtcctcaggcttggagtctgtgggatcatcgatcttggcccgctcatcccagtcttccggttttgaagcatcaggatcctttatcttcttgggtggcaggaagtcccaatcgtcttccaaggagccggactccacctggctgttgtcaatcttcacctcatangtgttgtctggccgcacaatcagtgtgt

SEQ ID NO: 1455 - DNA, 238 bp, Homo sapien
acaaggcccctctgcaactggagagaaaattaattcctatcccgtgagtggattgtgagaaattccacccacgtggagacagcttactgcagcactgttggtgttcggagctcttctgtgccctggctccatgctttcacctacacaagcatcaccttcctaatcaccgcggggcggggagcgtgtggctgtgccccttctctttaatctcatttaatttttattaaacatgctcagg

SEQ ID NO: 1456 - DNA, 452 bp, Homo sapien
  misc_feature (1)...(452): n = A,T,C or G
actatctgcccgtggtggggatggcagtaggatcatatttgatgacttccgagaagcatattattggcttcgtcataatactccagaggatgcgaaggtcatgtcctggtgggattatggctatcagattacagctatggcaaaccgaacaattttagtggacaataacacatggaataatacccatatttctcgagtagggcaggcaatggcgtccacagaggaaaaagcctatgagatcatgagggagctcgatgtcagctatgtgctggtcatttttggaggcctcactgggtattcctctgatgatatcaacaagtttctttggatggtccggattggagggagcacagatacaggcaaacatatcaaggagaatgactattatactccaactggggagttccgtgtggaccgtgaangttctccagtgctgctcaactgcctcatgt

SEQ ID NO: 1457 - DNA, 548 bp, Homo sapien
  misc_feature (1)...(548): n = A,T,C or G
accttcctctcaattttgctgtgaacctgaaatggctttaaattaatactcttattttttatttaatttaattacataaattaaaccttaccatgaccaaattgtgttaggacggcctgctatctacagcacagtgtgtcatttgcagatttgtggttacctataccacgctaggtgttttgacatgtttagtatttctgctttacagtgctgaattccatattttagaagctatgaaagtccttttatgaaaaagttactgattgcttctcagttattaggaaaacagttgtttcacaattattatgtagatatgatgcccaaatatcatttttagtatatcttgtcgatctttaagttgttactattgngttattcatgtctttaaatcagataccaaatattttttaggaaagaaaaatgttattactgtcattaggttgtcttttaatactttaagttattttgacgaaaagtaatagagaaaatttacttagcattttagattctagagacatggaaatgaaaattattttatgtctagagta

SEQ ID NO: 1458 - DNA, 246 bp, Homo sapien
actaatgtagttccactgtcaagtcttaacattcttcaaaccagtgtctggggttgatagactatttgtttgacatggcacaatgttttgaattgggtgggaatcttttcccccagttagaaaaacagatttaaataacttgtgctactgaaatcatttttacggaaaaatgagatgtgaatcagttcaagttccagtctaatgagttaatgtctctcactctctggcttcatgccatgtctccgt

SEQ ID NO: 1459 - DNA, 301 bp, Homo sapien
gctttcaacaaagattgaaattaaactgaaaaagccagaggctgtgagatgggaaaagctagaggggcaaggagatgtgcctacgccaaaacaattcgtagcagatgtaaagaacctatatccatcaccatctccttatacaagaaattgggataaattggttggtgagatcaaagaagaagaaaagaatgaaaagttggagggagatgcagctttaaacagattatttcagcagatctattcagatggttctgatgaagtgaaacgtgccatgaacaaatcctttatggagtcgggtggt

SEQ ID NO: 1460 - DNA, 417 bp, Homo sapien
actcctgaaatcagacatgttcctgtagaaagaattttaagttaggctttctatgcacctatcaagaatcaagagaatagattgtatcaaacaacggcagggaaatccttcagcaattctaatccactttgggttttcagctgtttttacatctaaagcaatagactagaactgaattatcttctacatagtaaaatcacaattgtggaattacaggaattctggtgatattaaggtgaaataacaaaacacaaaaggccctattttaacagttgatgtgacagtaagttttaatagaacctgtaacttcattttggaaatgcttctccaccaaataagggctttttcccctatttaaggagccagatggattgaaagatgtggaaataggcagctgtagatcttgatcttccaggt

SEQ ID NO: 1461 - DNA, 476 bp, Homo sapien; identical to SEQ ID NO: 482

SEQ ID NO: 1462 - DNA, 257 bp, Homo sapien
actatagggtaaatacgggccctatttcaaagatttttaggggaattaattccaggacgatgggcatgaaactgtggtttgctccacagatttcagagcattgaccgtagtatacccccggtcgtgtagcggtgaaagtggtttggtttagacgtccgggaattgcatctgtttttaagcctaatgtggggacagctcatgagtgcaagacgtcttgtgatgtaattattatacgaatgggggcttcaatcgggagt

SEQ ID NO: 1463 - DNA, 288 bp, Homo sapien
  misc_feature (1)...(288): n = A,T,C or G
acaattacccaccactggatttgactcanagaggacccccagagggtgtctccatcttccctatttattttcagcccttgagggcttcattgtagatcaaagccaaggcccccaggaaggtgacatactcctggaagttcacctcctggtccttgttccggtccaagtcttccatcagccttgcaatttcagcatcctgcagcttcgagccaatggtgagctccttctggatcagctccttcagctccttcttgctcagggtgtgcttgtcaccctccctgccggagt

SEQ ID NO: 1464 - DNA, 122 bp, Homo sapien
acctgaaaactgtgagcggataagtcaaagtggggactttctcaggtatcattacaatggcacgcttctggatggcaccctctttgattccagctgctctcggaaccgcacgtttgacacgt

SEQ ID NO: 1465 - DNA, 496 bp, Homo sapien
actattagaatgagtaacagagaacaaaccaccagcagcaaaaggttctaagtctgactgatgtgtagatgaactgacagatgagaaatttttaaattagagctatttggcccacatccttaatatttcaagatcaacataaaaataagaaatacaggtgggaatgataaagaatatgtctaggtcagagaaaaacattttgtctttcagttatcagctgtaatttgcatttccatcaccatctaataaacctttgaatataaatgtggacagagttatctgaattatctcttgcattccctgatctgaaaagttggaaatttattctaactcagacatcttggtctcctatgttgacaaggtgtttagtaataaaatgattttcacactgctgttccttcctgcccccttccctcccctagcctcacctcattgaattcagcacagttttgaaagatcaatctaaaatcagctacaaaatcttcaggttttgagt

SEQ ID NO: 1466 - DNA, 545 bp, Homo sapien
actcaactaaattggagaatgtttctgaagaaaattggatgaaattagctgctgagattgagtttctgccttaaaatctgaaacaaaaaaagggacaaattgctggtagatctactgactgtagccatcaccagaacacttagtttcttcccagacatgaatttcctgacaggctctgagccagaaacacactgtgggcgtgcatctggttcagccctggatatgcctccactgtggagggaagcattggaactggagttgtgcacagcaccgcagctagtgggcctggctgggggtgcagaagggcagggtagttctttccatttccccttgcagctacacttactttctccctgactaccaaatggagtgacggttgaagaatcaagctcataatatgatacacccagacagacccagaaatcttttgatttccccagcgagatacttaccactctctcttctctttcccatggttaaaacaggagttgtgttctctgtcgctgctaaattattcttcacttgagtgaagcaaatatttagct

SEQ ID NO: 1467 - DNA, 351 bp, Homo sapien
acacctttgccattgcggacgaagaggactatgctggggaggtgaaggacctggggctcagcgagagtggggaggatgtcaatgccgccatcctggacgagagtgggaagaagttcgccatggagccagaggagtttgactctgacaccctccgcgagtttgtcactgctttcaaaaaaggaaaactgaagccagtcatcaaatcccagccagtgcccaagaacaacaagggacccgtcaaggtcgtggtgggaaagacctttgactccattgtgatggaccccaagaaggacgtcctcatcgagttctacgcgccatggtgcgggcactgcaagcagctagagcccgtgt

SEQ ID NO: 1468 - DNA, 505 bp, Homo sapien
  misc_feature (1)...(505): n = A,T,C or G
actgcttgatggtgtccagggtctcttcctcacgcttcagtttgataacgtttgggtctgggaccactttctgggcaaacttccacacagagtcttcaaaggtggcggagaaaagcagcatctggcagttcctgggcagcatcctctggatgcggatgctctgatcttggtggccctgagtggctatcatgacatcagcctcatccagaacaaacaccttgattttcttgggatcaatgaacttgagcttggagcaccagtccagcacagtcccaggggtgccaatgacaatctgctcactgatcttctggcctctttccaatttattgcctcgaacagcataagctagcttcagttcagggtaaaatttgcccatttgttcaatcacttttcctgtttggagggcgagctcatacgttggggagagacatagacactgggggtatttgtttgcaggttctacttggctaagcatggccagcacgaangcagctgttttaccagt

SEQ ID NO: 1469 - DNA, 215 bp, Homo sapien
actacaagcccaccaagctaaagaggctgcccagaaagcagttaacagtgccaccggtgttccaactgtttaaaattgatcaggggccatgaaaagaaacttgtgcttcaccgaagaaaaatatctaaacatcgaaaaacttaaatattatggaaaaaaaacattgcaaaatataaaataaataaaaaaaggaaaggaaactttgaaccttatgt

SEQ ID NO: 1470 - DNA, 667 bp, Homo sapien
acatatagtcaatgaaatattcaaagaataactttatatactcttgttctttaaattctatcctctctttcagaattcttccatttaagtttgggtattttcctagtttcaacagatgaacagaagacttcattgaacattttgacagtaagctactagagaccaattatcaactggtgctacacatgctgtgttatctcccttactattaaactataaccctctcttgctattttgtttcatgcatcaccaaccaaacttcattttttctaataaaaaataaatatataaagaagacactgacaggcatatattcacaagatctcaacttcttaaaacataagtatgggtatatttatttctctcaaatgcatacaagacaataattacacagcaacaaatcttttgttcaacaatgatttgattcataagcatttgaaatttacataatttcatatcaatacccttgtatttttaaatacagtaagtaaaaaagcccccaaataaccaattcttatatttcctatttatccctctatacatccaaacttttaaaaagttacaaactgaacattatacagaacatataaatcatgtttaaaaacttgaggttttaaaaatcactgcttccccaatatgattcagaaaaattctcatactgacaagt

SEQ ID NO: 1471 - DNA, 165 bp, Homo sapien
  misc_feature (1)...(165): n = A,T,C or G
acatttaaggactgggctaatgctaatgtcagcagacagattgaggacactgtattatacggttactatactttatattctgttatatngttctgtgtgttcttctggatcccttttgtctacttctattatgaagaaaaggatgatgatgatactagtaaatgt

SEQ ID NO: 1472 - DNA, 152 bp, Homo sapien
ccatgcaaatctattaatcactaagggctaagtcactaaactacagctttcccatgatgctcaccatccatcctttgcggaaaccaaaatgctcacaactgaccatggtgttcacttagtatactagcttaaattaaaaaaaaaaaattagt

SEQ ID NO: 1473 - DNA, 402 bp, Homo sapien
  misc_feature (1)...(402): n = A,T,C or G
tttttttttttttttttttttttttttttttttaaaaanaattgtttatttaccgaacctggggcatattanatacaaccaattttaaatttacatnttttaaatcagttttgaagtgtttcacacacacaaaaaacttggcntgcaacagttgtcctaaggngaaagtcacctnattaataaactgtngcaagngttctcacccaagggggaagtntggtttatcctgaacatgaaaacctgtaacaaatttaaattaattatntaaaactcgttacttgtagttttgcccttgcaaagatccaaaaaaaaaaaaaaagcncaagtaactaatntgtntnagtcacaacataatcctggatcatccccataccaaaaccggatgcttttttaattttaaac

SEQ ID NO: 1474 - DNA, 173 bp, Homo sapien
  misc_feature (1)...(173): n = A,T,C or G
acccttgagacctggaaccagagccacaggccccttttgtgggtttctctgtgctctgaatgggagccagaattcactaggaggtcatcaaccgatggtcctcacaagcctcttctgaagatggaaggccttttgcccgttgaggtanaggggaaggaaatctcctcttttgt

SEQ ID NO: 1475 - DNA, 364 bp, Homo sapien
  misc_feature (1)...(364): n = A,T,C or G
acatctcaatcagatcacgtagtgtctttaaataggctattgcattgccgtctgtattacagcactgtcaagaaatctacaaaacacacntnacacactcttnaaaaaacaagtnnaacacgcctttnncgtcctncaaaagaggttncacagcnataagaaaaaacaaaaaccaccgtgaaagtaaagtgcttgtcattgcttnnaagaggaaacacacaatggtttctgaggcctttgatctatggcattagaacagaaatcattttaaaaaggggaaggagttttgtgttggaatcaattgtgctacctctgtaaaaatgaaggcaagggcctggctgccccaagatggtctggattctct

SEQ ID NO: 1476 - DNA, 521 bp, Homo sapien
acacttgaaaccaaatttctaaaacttgtttttcttaaaaaatagttgttgtaacattaaaccataacctaatcagtgtgttcactatgcttccacactagccagtcttctcacacttcttctggtttcaagtctcaaggcctgacagacagaagggcttggagattttttttctttacaattcagtcttcagcaacttgagagctttcttcatgttgtcaagcaacagagctgtatctgcaggttcgtaagcatagagacgatttgaatatcttccagtgatatcgactctaactgtcagagatgggtcaacaaacataatcctggggacatactggccatcaggagagaggtgtttgtcagttgtttcataaaccagattgaggaggacaaactgctctgccaatttctggatttctttattttcagcaaacactttctttaaagcttgactgtgtgggcactcatccaagtgatgaataatcatcaagggtttgttgcttgtcttggatttatacctc

SEQ ID NO: 1477 - DNA, 427 bp, Homo sapien
acagtttcagggcaagaaaacgaaatttgctagtgatgatgaacatgatgaacatgatgaaaatggtgcaactggacctgtgaaaagagcaagagaagaaacagacaaagaagaacctgcatccaaacaacagaaaacagaaaatggtgctggagaccagtagtttagtaaaccaattttttattcattttaaataggttttaaacgacttttgtttgcggggcttttaaaaggaaaaccgaattaggtccacttcaatgtccacctgtgagaaaggaaaaatttttttgttgtttaacttgtctttttgttatgcaaatgagatttctttgaatgtattgttctgtttgtgttatttcagatgattcaaatatcaaaaggaagattcttccattaaattgcctttgtaatatgagaatgtattagt

SEQ ID NO: 1478 - DNA, 561 bp, Homo sapien
acagttgtttatatatttgtttcagggccgaaactgggatgaggcaaatgacaggatcattattactgacttttctttagccttgggctccaatgtggcctgatatggcaatattaaattttgtcttcatttaaaattttgatattttgttaatcatgaatcttttggaatcattcagttttttaaaatattatatttaagtatttttatgttaattacttagttttgagcacccccttaaatggtatgcccaaggttaagcaccagattttcttaactcacttcaccctaatctagtcctaatttgttgaatgaacagtgagttctccccaggttgactactgacttgcaaactgtaactaatgaccagagaagccagaaacatagggtcttagataattggagcttgagatgatcgactgtagtatccaatccaatggaacccagaagtaggcaaataaatatcagcaagttaaagagtgagctggcttttgacacctagtccatgctttcctatcctactgtcagaatgcttgtagaaacagagatgtgatattaaga

SEQ ID NO: 1479 - DNA, 516 bp, Homo sapien
acttgcctcaggtccatatagctagagtggctttcaatctaccacaccacaaaacctatattctctgtattaccttccattgtcttgggttaaaaaaacaaaacaaaaatatttgagaagagagtgacagcaatgctaatatgtatatatatactgttttaccacactgataacttgagactagaaaaggtgctaatatttggtcagaattatcctattttacatgaaatataaatattttatttagatttatatatgaaattaaatttgtcttcaagacatcaagaatagactgatctaaaaaagtgtaaagtaatccacctacttcccatactcactgctagtatcatccaagccaccatatctcatccagatttctataccagcttcctaacttatctccctgtatccattcttgccctgtttgaatccattcatctcaccacagccagggtggtcctttaataaaaataaatctgatgatgttactctcctgctcacaggttcaaaacccgt

SEQ ID NO: 1480 - DNA, 356 bp, Homo sapien
acttccaactctgggttggccccaaatccaactaatgccaccaccaaggcggctggtggtgccctgcagtcaacagccagtctcttcgtggtctcactctctcttctgcatctctactcttaagagactcaggccaagaaacgtcttctaaatttccccatcttctaaacccaatccaaatggcgtctggaagtccaatgtggcaaggaaaaacaggtcttcatcgaatctactaattccacaccttttattgacacagaaaatgttgagaatcccaaatttgattgatttgaagaacatgtgagaggtttgactagatgatggatgccaatattaaatctgctggagtttcatgt

SEQ ID NO: 1481 - DNA, 600 bp, Homo sapien
  misc_feature (1)...(600): n = A,T,C or G
cgcatcctagccgccgactcacacaaggcagagttgccatggagaaaattccagtgtcagcattcttgctccttgtggccctctcctacactctggccagagataccacagtcaaacctggagccaaaaaggacacaaaggactctcgacccaaactgccccagaccctctccagaggttggggtgaccaactcatctggactcagacatatgaagaagctctatataaatccaagacaagcaacaaacccttgatgattattcatcacttggatgagtgcccacacagtcaagctttaaagaaagtgtttgctgaaaataaagaaatccagaaattggcagagcagtttgtcctcctcaatctggtttatgaaacaactgacaaacacctttctcctgatggccagtatgtccccaggattatgtttgttgacccatctctgacagttagagccgatatcactggaagatattcaaatcgtctctatgcttacgaacctgcagatacagctctgttgcttgacaacatgaagaaagctctcaagttgctgaagactgaaattgtaaagaaaaaaaatctncaagcccttctgtctgtca

SEQ ID NO: 1482 - DNA, 374 bp, Homo sapien
gagcgcagaaggcaggactcgggacaatcttcatcatgacctgctcccctctcctcctcacccttctcattcactgcacagggtcctgggcccagtccatcttgacgcagccgccctcagtctctgcggccccaggacagaaggtctccatgtcctgctctggaagcgcctccaacattggaactaattatgtgtcgtggtatctacaattctcaggaacagcccccaaactcctcatttatcacaatgatggccgtccctcagaaattcctgaccgattctctgccaccaagtctggcacgtcagccgccctggccatcaccggactccggactggggacgaggccatctattactgcgcaacatgggatagt

SEQ ID NO: 1483 - DNA, 504 bp, Homo sapien
acataatagaagggctgacggaaaaatcatcccagatcgtggacccttgggagaggttgtttaagattttgaatgttgttggaatgagatgtgaatggcagatggataaaggaagacgaagctatggagatattttgcatagaatgaaggatctctgcagatacatgaacaactttgatagtgaagcacatgcaaaatataaaaaccaagtggtgtattccaccatgctggtcttctttaagaatgcattccagtatgtcaacagcatacagccatctctcttccaaggtcctaatgccccgagccaagttccactggttcttcttgaagatgtatcgaatgtgtatggtgatgtagaaattgatcgtaataaacacatccataaaaagaggaaactagctgaaggaagagaaaaaaccatgagttcagacgatgaagactgttcggcgaaaggaagaaatcgtcacattgtagtcaataaagccgaacttgctaactccactg

SEQ ID NO: 1484 - DNA, 343 bp, Homo sapien
  misc_feature (1)...(343): n = A,T,C or G
acttgtttttacatatatagcttatgtaatttctttatataaattaatgcttaataactgaaagcaagtgagctccaaagatgaaatttcagaaacagtatacatgaatgagtgtgttctactggtctgctaagagctttaaatggaagtggccgntcaaagcacagtgtcctgttaactcttgagtgctaagtagatctttgcaacagtaagcttgattgatcatgggttaaaaagagagaatattgaaatagatgttttaatacaggctggaaatcagctattcaacactatcattgatttagtatacaagaaatcatatggattaactgaacttaatagt

SEQ ID NO: 1485 - DNA, 342 bp, Homo sapien
  misc_feature (1)...(342): n = A,T,C or G
catgttttaagtagctacaggagctatagatttgaatctaatgttgcattanncttttcagttatcttctacctcctgtattttctactgtaataatgtaatttaaggccttccacaatgaacagttcactttattccctgggttttctataaacagttttaaggatatgatttggttaaaaaataatttgttataaaaattctgtttgcaaattaaactggaaaagtatccagagtctcaaaaggcaatgatttgtgagataatatggcatgcccggagccctgctcatcaatgaaaaacccatatgtaataatcgaattcatttaacatgaatcttgagt

SEQ ID NO: 1486 - DNA, 233 bp, Homo sapien
acctttaccctcaggcaaggagcaatctcttctcttcctcttctaccttgctgtagcttctccccaaggatttatcacattctgccttgaatcatagggaacagcatgtgtagtggaatgaacacaggcctctgaatccaagatacgagtttaaatcccagctttggaggtggttacttaaagtctcagtgccttcattcttcttcctatataaagtagatattacacactat

SEQ ID NO: 1487 - DNA, 374 bp, Homo sapien
acagatggcggccaagaaccccacacatccagctcgatgtcacaatatggggaacatctgacatcacccatcatggctgatcagcagcctccacaggtgggtctttcaggaggcaggaagtagagcgagggtccatggctgagtgcattatagtgatataaacatcatccatgtttggcatgacaaaaactttctgaaactcttgctccagtttcttctctatccagtctgtcacatgaactaaagtcacttctctctctccaagttttggccgagctttcagctccacatgtggtggctttcggaaaccataccatactcggtcagtcgggggtggtggaatgttgaccgccaaggttcctctacattcttgg

SEQ ID NO: 1488 - DNA, 76 bp, Homo sapien
actgatgctgtcagtgtttaacactatgtttagctgtgtttatgctataaaagtgcaatattagacactagctagt

SEQ ID NO: 1489 - DNA, 302 bp, Homo sapien
acaagtgaaggtgtcagtaaagaaatgcatcaccttcagcgcatgttcttacagaattgctgggaaattcctacttatggagcagcatttttcacaggacagatatttacaaaggcaagccccagcaatcataaagtcatccctgtgtatgtaggagtgaatataaaaggacttcatctcctcaacatggaaactaaggctttactcatcagtcttaagtatggttgttttatgtggcaattgggagatactgatacttgttttcagatccatagcatggaaaataaaatgagctttatagt

SEQ ID NO: 1490 - DNA, 383 bp, Homo sapien
acagaactcagaggaaaaaagaaattaaattttagctttctggagagcagcccctctctggcaccatcaaacacttctttgtttcccttcaacttggaactcttcaaacatcaggggttgtgagggtttggccattcttttatcttgggtccgtgtgagtgacagaaatggtgcggcctgggaaagatctccctcctttacattttctcttctccctcctcctccttattctaaaactgtgcctccaacagaggggcaggggctcttgtagagagatccctggcccaggacaggagatgccaaatctaatttatctcactgagggcctttgagaaaaacgcttctgggccaggctcagtggctcatgcctatatagtcccagt

SEQ ID NO: 1491 - DNA, 223 bp, Homo sapien
acccctttattgctcaaagaaagcaagccacaaacaataatgaagcaaaaaatggaatctaagaatctttttgtatggaatattacttctatcagaagatgatcaagatgtttcagtccagtgcacatcagcattgctgacattttatggattctaaacttgtgttgtttcttttttaaatcaactttttaaaaaaataaagtgtaaattaaccgactagagt

SEQ ID NO: 1492 - DNA, 523 bp, Homo sapien
  misc_feature (1)...(523): n = A,T,C or G
acttaattactaagcactaactctgtgggctaggcactgtggaaacctaacaattcttgctttcaacatttttaaattctaataattggagagaagacgaaaggacacgaataaatacaaggcaaaaaggcatgctggaatacaatgactatatatgatcatataaaggtatttcaccggaaatccttagtgagcagatggtttaatttgtangaattccataaaagaaaaatgtttcttaacaattagtgaaacaacttacttgtgaatggtctgttttttttaaaggcaaccaacccataaagtgagacatagcaatgtttgtgcagcatactaatgttctaagtaagattttggtatttgacaataaatgaataaaaaccatgtatttttattttaaccattacaacaatacaattgcagatacttgtgtatttgttcaattagattaagaaattaaaaagaaaaaaatacaataaaaggggtaggcatcccatgacactgatttccaatgtggtacctc

SEQ ID NO: 1493 - DNA, 361 bp, Homo sapien
actcttgtggggatgagactaagttaagttcacccaaagactctgtggtatttaagacgcagccttcctcattaaaaattaagaagtcaaaacgaagaaaagaggatggtgaacgttctcgctgcgtatactgccaggaaaggtttaatcatgaagaaaatgtcaggggaaaatgtcaggatgctccagaccctattaaaagatgcatatatcaagttagttgcatgctctgtgcagagagcatgttgtatcattgtatgtcagactcagagggagatttttctgatccctgttcgtgtgacactagcgacgacaagttctgcttgcgatggttagccctggtagctttgtctttcattgt

SEQ ID NO: 1494 - DNA, 440 bp, Homo sapien
  misc_feature (1)...(440): n = A,T,C or G
actcctctctacccctaaggttgggctctgcctcagaggagtgagttttttttttttttctataaagtttacattgtcttactatttattgagttgaatttctggtcattgcctatgcaaatataanaaatctggctttaaatattagtcagtttcatggctatgactagattgttttcttgtataactaaatacctgtataaaatgaactaatgttttctctcccctccctaccccttccttatgaacaatgctttaggtatattgaaatctttaanagcagtagagctgaagttagaactcattatgatccaccacgaaagcttatggccatgcagcggccaggtccttatgacagacctggggctggtagagggtataacagcattggcagaggagctggctttganaggatgaggcgtggtgcttatggtggaggt

SEQ ID NO: 1495 - DNA, 407 bp, Homo sapien
  misc_feature (1)...(407): n = A,T,C or G
caagcttttttttttttttttttttttttaagaggaaaacccggtaatgatgtcggggttgagggataggaggagaatgggggataggtgtatgaacatgagggtgttttctcgtgtgaatgagggttttatgttgttaatnnggtgggtgagtganccccattgngttgtggnnaatatgtanagggagtatagggctgngactagtatgttgagtcctgtaagtagganagtgatatttgatcagganaacntggttactancacananagttctcccagtaggttaatagtggggggtaaggcgaggttancnaggcttgctnnaagtcatcaaaaagctattnncgggagcagagtttgaagtccttnaganaggattatgatgcgactgtgagtgcgttcgt

SEQ ID NO: 1496 - DNA, 212 bp, Homo sapien
catataaatagaatcatggaagctttttatattacctgttttatggccttatagaattaatgaaccaaatgaaaactgaatctccattccacaatcccatcctttatttctattcttattttcaaggtagtattaagtgtccatatttctcaagccacattcaaggaaatcatgtcttaactattttggatgttgcctctccttcatcgtgt

SEQ ID NO: 1497 - DNA, 188 bp, Homo sapien
aacacagcaagcctggatctgtgccacttgtgtcagagaagaagaaacacgtagtggcagttgtaaaataattggtattcctaacaatcctgatgtataattatttgttacttttgatttgagaactctacaaataaaagtgctgggactagattaattgcaaaaaaaaaaaaaaaaaaaaaaaaaaa

SEQ ID NO: 1498 - DNA, 324 bp, Homo sapien
  misc_feature (1)...(324): n = A,T,C or G
actttgcccgaatgtgctccttgatgttaagtaaggaattgccagcaaggattcgtttcctgctgcaggataccgtagagttgcgagaacaccattgggttcctcgcaaggcttttcttgacaatggaccaaagacgatcaatcaaattcgtcaagatgcagtaaaagatctaggggtgtttattcctgctcctatggctcaagggatgagaagtgacttctttctggagggaccgtccatgccacccaggatgaaaatggatagggacccacttggaggacttgctgatatgtntggacaaatgccangtangcggaattggt

SEQ ID NO: 1499 - DNA, 282 bp, Homo sapien
acgttgtatggtttgttttttttttttaaccaagatttaaattaaaaaaaatttgagaacacataatagaagaaaattgtgagaatggggtggtcaatatgtgaggggcatacacacaccaaggtcagatttggcattaggggtttatgggtagtttcggagagagccatttgagcagaaaggtggggaaagaagctagacctcaggggattggagagagctcaggcgacactggagggaggtgggggcagccagaatggactcactcctatgtttggtggt

SEQ ID NO: 1500 - DNA, 470 bp, Homo sapien
acctttgagtcattaaaatgtcttaaaagataacagcttgttaccagaacattagaaaccatagccatgattctcaagcgttaacaatctacatttgatattttcttggccactgcattcttcaatgaataataatttccagaattccattccatgttgttttccaatagatcttttcacactcgatgttgaatacatggctctttgcagatgaataaaacaagtgcattcagtttagagatccattttgcgaaggctcattcgactgaaggaatctctgtggcaggtgacaggcaatactgccttgtataactgagggatctttctgttgatcagtggctgtagggcctctttaaggcgatgatagtttctctccagttccctttgatactccttttgatccggcccaattaagctcttattttttcttaaggcatcttcacaccttttagtaaaatctttaaggcgat

SEQ ID NO: 1501 - DNA, 417 bp, Homo sapien
acctgctggggtcatcgggagacttgaagtccaggtcatacttcccagacctgaagaactcggaggccgctacgtccatgccgatgaccaccttatcagtgtagccagctttcccaatagcagtcttcagcagctccaggccttctttattctccaggatgttgggagcaaacccgccttcatcccccacattggtggcatctttcccatatttctccttgatgacattcttcaggttgtggtaaacctctgctccaatgcgcatggcttccctgaagtttgctgcaccgactgggaggatcatgaactcctgcatggccagcttgttgccagcatgagaaccgccattgatgacattgaacgccgggactggcaggatgacttcagagttgccagccaagtcagcgatgtggcggt

SEQ ID NO: 1502 - DNA, 233 bp, Homo sapien
acaaaaaaaaccttacataaattaagaatgaatacatttacaggcgtaaatgcaaaccgcttccaactcaaagcaagtaacagcccacggtgttctggccaaagacatcagctaagaaaggaaactgggtcctacggcttggactttccaaccctgacagacccgcaagacaaaacaactggttcttgccagcctctagagaaatcccagaacactcagccctgacacgttaa

SEQ ID NO: 1503 - DNA, 492 bp, Homo sapien
  misc_feature (1)...(492): n = A,T,C or G
acaatgttatgtcgggaacacgtgctgctaactcactggtgagttcaatggcaacgcttcattcgggaggctgttctgctttacgcatctgagaactacataggagagcaagtgtctgcacctcctaactgcagaagctaccgtcttctcaaagacgaaggtctttgcaaagttcagtgctcggtgttctcggcacaacaatgcagtgtagttcagaaggtattttggcaactcttaatctgaacaagaatggggggggcgcttttgaaaaataaggctttaagaaggcttgtcattttagggctaaattttaatagaatgtgagtctgaactcttacatttagaacaaacaaaaccttaaaattactgattggttcaaaaaatggttttatggaaaaattaatctgtaacaaaaagttggcattgagtgcgaaggttccaccgttgtttttttttttgntttttttttttgnttttttttgagcaaagcgt

SEQ ID NO: 1504 - DNA, 413 bp, Homo sapien
  misc_feature (1)...(413): n = A,T,C or G
acaataacctctaaaatatttgaagattatgacatataatatgatgaggattacatatgaaactattataagtagtagtaattattattccatataatactaattatacttggtcatttttccccctgaattgtttccccaggaattctttctgcttgttaantttgctgtgtatttttcatgttgctcttttccttaaatatttgctgnttctcatttgtctacttgcaaatgagagcctaggagtcaacaaactttttatataaagggtaggctttaaggcccaaacacagtatctgtcatatattgttttggtgttctacaaccctttaaaaatgtaaaatctactaagaaataggtagtggaaggcctgtanatagcagttttccaaccaataaatttctcagtatcat

SEQ ID NO: 1505 - DNA, 464 bp, Homo sapien
acactgatctgagatcgcaccactgcactccggcctgggcgacaaagtgagactgtctaaaaaataataataataaaaagcattttgaaattagtcgtggtcaatgcaattctactctttggaatccgtttagctaaatgaatgtagtgctcttgttgaatggaaacaggtgataggaaatgcctaccatttgactcaatatggataatcaagagttgctcaggatgcttggatctgggggtagattctcattcatcattgccctggcacatgtcaattactacataaaaggtcaaatgcaatgtcaaatccaaagcctcaggaggaaagtgagttcagttcccaagagaacagcaatagctcaacaatgtaaaacttcatctagagtatatcggcattaaattagtgctgtcgaaacaatacgttgaggaattacagtaacacctggaagttccttctcatgt

SEQ ID NO: 1506 - DNA, 542 bp, Homo sapien
  misc_feature (1)...(542): n = A,T,C or G
acccagtanntcttcttcaaggaaaaattctcaggggagtaacagaagcctggatacaattactctatcaggagatgaaagggactttgggagactgaatgtgaaattgttttataattcttcagtagaacagatctggatcacagttttacagtgcagagatttaagttggccctctagttatggagacactcctactgtttctataaaaggaatacttacattgcccaaaccagtgcatttcaaatcttcagccaaggaaggttccaacgctattgaatttatggaaacgtttgtatttgctattaaacttcaaaatctacaaactgtaagacttgtatttaagattcaaacccagactcccaggaagaaaaccattggagaatgctcaatgtcactcagaacccttagcacacaggaaatggattactctttggatataacaccaccttcaaaaatttctgtttgccatgcagaacttgaattggggacttgttttcaagcagtaaatagcagaattcagttacaaattcttgangcac

SEQ ID NO: 1507 - DNA, 469 bp, Homo sapien
acacaaatgtttatttctcaattaaacattccctttaaacacaaggaatgagttctaaatcttcataaagatgaattaaaaatgaaatccctccagtatagtgtatataatcactgtgttcttggtcactactggcatttactgtttaacatcaaaaacaaagacaggtcatttaaaaatcatgctactggatttctagctcttcctctatgaccagttctacactgatctgcaatgtttaaaagtttacatcaccaaatcaaagcaagtttaaggtgtgaagtagctgtgcattaaacacaaaataaacaataaaattataagatatagtcaagttcataacgaatataggtgttcttatctacattggttcccaggacgctctcatagcacattacccaagaatctacaacgatgataagaacacctatattcgttatagattcttgggtaatgtgctatgagagcg

SEQ ID NO: 1508 - DNA, 255 bp, Homo sapien
acaatgaattccttgatttttcaaggctgaccctgtttccttggttaacaatttcaatttaggccttataggaaaaaacgtaagggatcctttatctgcctccaactaggtaagttatttgataccactgacagcttaaaaagtaatgtcctaacctttctgaagattctggttgccataaccatgctactacagtctgttgttagtttgctctattaaaactaattggtctggagaaaacctacctgcagttgt

SEQ ID NO: 1509 - DNA, 474 bp, Homo sapien
  misc_feature (1)...(474): n = A,T,C or G
acaagctttttttttttttttttttttttttttttaatcatatttgatagcagctttttttattggttacaaaacctaagcccatatacaaaattaggaacacatttanatgcctnttttgaaanaacgttttagtctttttaaactgagtttaaaaaaaaataacaatgcaatttttaaacactgttttgaaaacttaaaagtgcagcaatatacctagtttcctttatctacnaaatggngcaattccaattcaaaactggtaaggncacaaattgaatcaaggaaatgcatacaagngtctgcnctacttgatgctaatgttcacttaaatgttagtttgcactttaaaacatganaggaaataggaatcatcacagtagaggcccaattttaatcataatgggngcaaattttaaaaggtaactgtcagttaagtaaggaaagtccagaanaaactaaactggaaggggt

SEQ ID NO: 1510 - DNA, 326 bp, Homo sapien
actcatgattggctttaatatttctttacactatacatactgaaaatgtttacatttactaataaggaatgccaagcgtatccatcaccatttgaatagcttgcaggggatttgtgatttcttccatgttatctcttctcaaaacccaatctggcttaagtcttgaaactattctggtccttacaggtgtttctgggataaaaggaatgcttatagaagaattcttcttttgcttgtaaagtattctttcagtattcattttatgtttatgagctgtaagtttgtagagactgtaaatacggtcaacaactttggacctacttcgt

SEQ ID NO: 1511 - DNA, 227 bp, Homo sapien
cttctatggtggatggtttgaaaccaggtcagagaaaggttttgtttacttgcttcaaacggaatgacaagcgagaagtaaaggttgcccaattagctggatcagtggctgaaatgtcttcttatcatcatggtgagatgtcactaatgatgaccattatcaatttggctcagaattttgtgggtagcaataatctaaacctcttgcagcccattggtcagtttggt

SEQ ID NO: 1512 - DNA, 357 bp, Homo sapien
accattcagttcagctgcaggtataggcagtgacaagtatctaattcttagaagaatcacttactcccacaatctgtccagacacattaatctaaggacaagtttataaatagcaaacgtgattttcacattgcagtgttctcaagaatgtatatacaagtgtgtagtcctgttgatgggatgtttccccgagttctttctattgatgcgttcatgctcttgaccctggtagagacagttctttctttccacagagcagattttcttttgtcatccaccatttacaatactctgtgaattagtattacttattacatttatgaaacggcaatatttggattgtaatagctcttcagt

SEQ ID NO: 1513 - DNA, 370 bp, Homo sapien
acatgggtgaattttatatgtgatttttgttttgttttgttttgttcagattaactgcttatagccttagaaagccttttacaaaattaaaaaaaaaatagatgtgcattcagtttttaagaatggaatcatccaaaggaattccttttttgaggtttggatgttgcagctagtaaaggatatttttgctctgttcagcagttctaaaaattgctgaagtaggggccaggtcactggtagttatagtatggaatgggagaagtgaaagttcagttatagaactttccatacttccaagtttactgcaagtttttatgcttgagagagatgctttctaatataagactgatgtgttgattttactgattgt

SEQ ID NO: 1514 - DNA, 289 bp, Homo sapien
caagtctgtggcttggtgagtctgtgtggccagcagcctctgatctgtgcagggtattaacgtgtcagggctgagtgttctgggatttctctagaggctggcaagaaccagttgttttgtcttgcgggtctgtcagggttggaaagtccaagccgtaggacccagtttcctttcttagctgatgtctttggccagaacaccgtgggctgttacttgctttgagttggaagcggtttgcatttacgcctgtaaatgtattcattcttaatttatgtaaggttttttttgt

SEQ ID NO: 1515 - DNA, 200 bp, Homo sapien
acagaattgtccatgtgctccaggactagttgggctatgacagacaccacagattgctctgcaacttccggggaacattatctgagtcacatgcttctctggtcatgtttttccaacatcaaaatgaaacacttttctccatggaatgtggagtgacaaattatctcaaaccaaagtcatccttcatcatgacggcatgt

SEQ ID NO: 1516 - DNA, 567 bp, Homo sapien
  misc_feature (1)...(567): n = A,T,C or G
acgatcgaagggactacgtcttcattgaattttgtgttgaagacagtaaggatgttaatgtaaattttgaaaaatccaaacttacattcagttgtctcggaggaagtgataattttaagcatttaaatgaaattgatctttttcactgtattgatccaaatgattccaagcataaaagaacggacagatcaattttatgttgtttacgaaaaggagaatctggccagtcatggccaaggttaacaaaagaaagggcaaagcttaattggcttagtgtcgacttcaataattggaaagactgggaagatgattcagatgaagacatgtctaattttgatcgtttctctgagatgatgaacaacatgggtggtgatgaggatgtagatttaccagaagtagatggagcagatgatgattcacaagacagtgatgatgaaaaaatgccagatctggagtaaggaatattgtcatcacctggattttgagaaagaaaaataacttctctgcaagatttcataattgagagaattcctgagttgatagctctaaangcagatatgctgtatt

SEQ ID NO: 1517 - DNA, 411 bp, Homo sapien
  misc_feature (1)...(411): n = A,T,C or G
cccccagctggctagagatttatttgttgtaaatgctgtatagatttggttttcctttctttacttaccctggtttggatttttttttttttttttgaatggatttatgctgtcttagcaatatgacaataatcctctgtagcttgagctacccctcccctgctgtaacttacgtgacctgtgctgtcactgggcataggacagcggcatcacggttgcattcccattggactcatgcacctcccggatggtttttgtttttttcgggggttctttggggtttgtttgtttgcttcttttccagagtgtggaaagtctacagtgcanaaaggcttgaacctgccagctgatttgaaatactttcccctgcgcagggccgtatgcatcctgccaagctgngttatattctgt

SEQ ID NO: 1518 - DNA, 532 bp, Homo sapien
  misc_feature (1)...(532): n = A,T,C or G
accctctcttccagcacccaggccagtattgagatcgattctctctatgaaggaatcgacttctatacctccattacccgtgcccgatttgaagaactgaatgctgacctgttccgtggcaccctggacccagtagagaaagcccttcgagatgccaaactagacaagtcacagattcatgatattgtcctggttggtggttctactcgtatccccaagattcagaagcttctccaagacttcttcaatggaaaagaactgaataagagcatcaaccctatgaagctgttgcttatggtgcagctgtccaggcagccatcttgtctggagacaagtctgagaatgttcaagatttgctgctcttggatgtcactcctctttcccttggtattgaaactgctggtggagtcatgactgtcctcatcaagcgtaataccaccattcctaccaagcagacacagaccttcactacctattctgacaaccagcctggtgtgcttattcangtttatgaangcgagcgtgccatgac

SEQ ID NO: 1519 - DNA, 501 bp, Homo sapien
gcggccgactcgcaagatggcgccgcagaaagacaggaagcccaagaggtcaacctggaggtttaatttggaccttactcatccagtagaagatggaatttttgattctggaaattttgagcaatttctacgggagaaggttaaagtcaatggcaaaactggaaatctcgggaatgttgttcacattgaacgcttcaagaataaaatcacagttgtttctgagaaacagttctctaaaaggtatttgaaataccttaccaagaaataccttaagaagaacaatcttcgtgattggcttcgagtggttgcatctgacaaggagacctacgaacttcgttacttccagattagtcaagatgaagatgaatcagagtcggaggactaggcaaaggctccccttacagggctttgcttattaataaaataaatgaagtatacatgagaaataccaagaaattggcttttagtttatcagtgaataaaaaatattatactctcgaa

SEQ ID NO: 1520 - DNA, 406 bp, Homo sapien
ctcctgacatagccagctgctgtgaaataatggaagagcttacaacctgccttaaaaattaccgaaaaaccttaatacactgctatggaggacttgggagatcttgtcttgtagctgcttgtctcctactatacctgtctgacacaatatcaccagagcaagccatagacagcctgcgagacctaagaggatccggggcaatacagaccatcaagcaatacaattatcttcatgagtttcgggacaaattagctgcacatctatcatcaagagattcacaatcaagatctgtatcaagataaaggaattcaaatagcatatatatgaccatgtctgaaatgtcagttctctagcataatttgtattgaaatgaaaccaccagtgttatcaacttgaatgtaaatgt

SEQ ID NO: 1521 - DNA, 435 bp, Homo sapien
actttacccttcaacgggacaagaaactgcaccagaagtcaacttcacatttgaaggagaaactggaaagaatccagatgaagaagacaacacattttatcaaagacttaagtccatgaaggaaccgctagaagcacaaaatattccagacaattttggaaatgtatctccagaaatgacgctcgttctacatttagcctgggttgcctgtggttatataatatggcaaaattctactgaagacacatggtataaaatggtaaaaattcaaactgtcaagcaagtgcaaagaaatgatgactttattgaattagactacaccattctacttcataatatagcatctcaggagattattccctggcaaatgcaagttctctggcatccacaatacggcactaaagtaaaacataatagccgtctgccaaaggaagt

SEQ ID NO: 1522 - DNA, 245 bp, Homo sapien
acaatgacggggaggaagagggttggttaaagcatccctctaagcagttttctgctgtcccttctttccaatcagagatttgtggatgtgagggatcacaccacccccagctatggtagccttgataagagaatccaactcttcatcaccacggattgcaagctgcaagtgacgcggagtgatacgctttactttgagatccttagaagcattacctgccagctccagcacctctgcagtgaggt

SEQ ID NO: 1523 - DNA, 272 bp, Homo sapien
acatggcaaaaccaacaatgctgtgtccttccggagtccagtgctctttcggcacttctgcaaccaggcagtggtaaaaggggtgctctccaaaaccatcttctagcagatctttttcagttaagattacttgttcttccatgtattcatatttagccagctccttgatcagccgcagtatgtcactgcagtcggcggcagtggctgggcggatcacgaatttagccattttcgtcttttgcttttcttccctttgcggaccaggcccctgt

SEQ ID NO: 1524 - DNA, 289 bp, Homo sapien
gaggaaggtgggtctgaatctagcaccatgacggaactagagacagtcatgggcatgatcatagacgtcttttcccgatattcgggcagcgagggcagcacgcagaccctgaccaagggggagctcaaggtgctgatggagaaggagctaccaggcttcctgcagagtggaaaagacagggatgccgtggataaattgctcaaggacctggacgccaatggagatgcccaggtggacttcagtgagttcatcgtgttcgtggctgcaatcacgtctgcctgtcacaagt

SEQ ID NO: 1525 - DNA, 543 bp, Homo sapien
  misc_feature (1)...(543): n = A,T,C or G
accaaagcttacatttgtaaataactataaactgcaatattttacaggaaaaaagaaatagcatttttacacatttttaaataatagcttgcatacttttttttttgccgaaagtggcatttttcagcatccagagggtttgggcatagtggcgagtggggtatctgttgttgttgttttttgttttagacatgtagaggtgtggcttccgaaccccgtgagtcctagacagctttctatcttcccacagctgcatgcatgtttcctcacaaaccagttctgcatataaaagctcattttttaattattaaataagttttgtgtctgacacagcttttgatctgaatgaaatgcctttaagcctttttttcttctttttttttttcaagtgaaaggcacagaaatgcaattacagtcctcaaagggttaaatttgacactaccangttctatgacctttattgncatggnaacttnaccattttagganggctttttatcattggtatttggggctttctttactgntaaanaatgtctctga

SEQ ID NO: 1526 - DNA, 351 bp, Homo sapien
accaaatttaacttggcaaactttctattgcctgtcccatgtgcatcttatttaaaatttcccccatggaaatcactctcctgttgactatttccagagctctaggtgtttaggcagcgtgtggtgtctgagaggccatagcgccatcatgggctgatttttattaccaggtcccccagaagcaggtgggaggctctgcttcctgctgccgctctgcagcctggacctgtggaccctggttgtaaagagtaaattgtatcttaggaaaccagtgtcaccttttttttcaccttttaattttatattatttgcgtcatacatttcctgtaacggaagtgttaattttactgt

SEQ ID NO: 1527 - DNA, 466 bp, Homo sapien
acaataaaactgttgtcagcttttgttttacagagaacgctagatattaagaattttgaaatggatcatttctacttgctgtgcattttaaccaataatctgatgaatatagaaaaaaatgatccaaaatatggatatgattggatgtatgtaacacatacatggagtatggaggaaattttctgaaaaatacatttagattagtttagtttgagggagaggtgggctgatggctgagttgtatgttactaacttggccctgactggttgtgcaaccattgcttcatttctttgcaaaatgtagttaagatatactttattctaatgaaggccttttaaatttgtccactgcattcttggtatttcactacttcaagtcagtcagaacttcgtagaccgacctgaagtttctttttgaatacttgtttctttagcactttgaagatagaaaaaccactttttaagt

SEQ ID NO: 1528 - DNA, 213 bp, Homo sapien; identical to SEQ ID NO: 1431

SEQ ID NO: 1529 - DNA, 321 bp, Homo sapien
actgaatacttcggcaaacttattgggtcttcattttctgacagacaggatttgactcaatatttgtagagcttgcgtagaatggattacatggtagtgatgcactggtagaaatggtttttagttattgactcagaattcatctcaggatgaatcttttatgtctttttattgtaagcatatctgaatttactttataaagatggttttagaaagctttgtctaaaaatttggcctaggaatggtaacttcattttcagttgccaaggggtagaaaaataatatgtgtgttgttatgtttatgttaacatattattaggt

SEQ ID NO: 1530 - DNA, 257 bp, Homo sapien
actcgatgtttttaaatgtatttctaataattattagtagggtcacacctatttgacagcttttttaaaaagtcacatattgctgtatttttaaagatgacaaacctttatttaaatgagatgcttgctggagattttctttttcaaactcactttttaagttatggaaataatatcactgctgaaagtttggaaaacatatataagggtgccaaaaataccactaaaatcacataaaccaatcttaccattattaa

SEQ ID NO: 1531 - DNA, 96 bp, Homo sapien
accagttaacaagctcgctcctctttaatgctgactcgtcctcttcttcttccacctttctgaggtgaagcacaataaggttagagattcggcagt

SEQ ID NO: 1532 - DNA, 293 bp, Homo sapien
accattatggtttccatatggtaattacattggaaagttctgcaataagattctagttctctcttttctttaagcttatggttgaaggttaaccttgtttgtgcagattaccaaattactgctgatgtagtatgataaagtcagcttcttggatacagacacacccagggcagctgccaatcagaaatgcaaattgctaaattccaaacagaaccagtgactttgctgctacatatttactaaattgaccactttgattcttgcttgtttgtctcagttatagggagttttgt

SEQ ID NO: 1533 - DNA, 421 bp, Homo sapien; identical to SEQ ID NO: 1179

SEQ ID NO: 1534 - DNA, 572 bp, Homo sapien
  misc_feature (1)...(572): n = A,T,C or G
actgttcctgttggccgagtggagactggtgttctcaaacccggtatggtggtcacctttgctccagtcaacgttacaacggaagtaaaatctgtcgaaatgcaccatgaanctttgagtgaagctcttcctggggacaatgtgggcttcaatgtcaagaatgtgtctgtcaaggatgttcntcgnggcaacnttgctggtgacagcaaaaatgacccaccaatggaagcagctggcttcactgctcangtgattatcctgaaccatccaggccaaataagcgccggctatgcccctgtattggattgccacacggctcacattgcatgcaagtttgctgagctgaaggaaaagattgatcgccgttctggtaaaaagctggaagatggccctaaattcttgaagtctggtgatgctgccattgttgatatggttcctggcaagcccatgtgtgttgagagcttctcagactatccacctttgggtcgctttgctgtttcgtgatatgagacagacagttgcggtgggtgtcatcaaagcagttggnacaagaaggctgctggagctggcaa

SEQ ID NO: 1535 - DNA, 306 bp, Homo sapien
acctgcgtttcctgcgctctgcggagttcttcaactacactgtgcggaccctgggcctgggagaggagtggcgagggggtgatgtggctcgaacagttggtggaggacagaaggtccggtggttaaagaaggaaatggagaaatacgctgaccgggaggatatgatcatcatgtttgtggatagctacgacgtgattctggccggcagccccacagagctgctgaagaagttcgtccagagtggcagccgcctgctcttctctgcagagagcttctgctggcccgagtgggggctggcggagcagt

SEQ ID NO: 1536 - DNA, 547 bp, Homo sapien
  misc_feature (1)...(547): n = A,T,C or G
acaaaatgaaatagacagacttaatgaacaagccagtgaggagattttgaaagtagaacagaaatataacaaactccgccaaccattttttcagaagaggtcagaattgatcgccaaaatcccaaatttttgggtaacaacatttgtcaaccatccacaagtgtctgcactgcttggggaggaagatgaagaggcactgcattatttgaccagagttgaagtgacagaatttgaagatattaaatcaggttacagaatagatttttattttgatgaaaatccttactttgaaaataaagttctctccaaagaatttcatctgaatgagagtggtgatccatcttcgaagtccaccgaaatcaaatggaaatctggaaaggatttgacgaaacgttcgagtcaaacgcagaataaagccagcaggaagaggcagcatgaggaaccagagagcttctttacctggtttactgaccattctgatgcangtgctgatgagttangagaggtcatcaaagatgatatttggccaaacccattacagtncctc

SEQ ID NO: 1537 - DNA, 270 bp, Homo sapien
  misc_feature (1)...(270): n = A,T,C or G
acaatgctaattaanncccaatctacaggtttaccacctttgtgggctaattagcttccaatagaggagaatctcatgtttccatagctataaagtgcaccccttatccctgcgaacctcttcacaaatgtgctgttggtcataagggggacagtttgagactatggagtgctccatgaatagaaaagcagttcaaagcacgtgtctcacactcacggagtcagcactgcctccttcacatacgaggaacagtgtagtcattcttaatgt

SEQ ID NO: 1538 - DNA, 210 bp, Homo sapien
acgtgccaagcatcctcgtgcgaccgcgagagcccggggagcgggggcttgccggccgtcgcactcatttacccggggacagggagaggctcttctgcgtgtagtggttgtgcagagcctcatgcatcacggagcatgagaagacgttcccctgctgccacctgctcttgtccacggtgagcttgctgtagaggaagaaggagccgtcgg

SEQ ID NO: 1539 - DNA, 232 bp, Homo sapien
acgcaatcttaaagagggagtaaggacaggaattcagggcagggctctggcagttacggtcaactaagttgtagaggtttcagcgactgcggtcagatagacattagacgtcgtcagttatcgcttctgacggcacttcccagttctctcgggtttgcacacccccactgtgggccggggaaccgggtcccggccttcgcagactccaggctctggcagatgtggccctcca

SEQ ID NO: 1540 - DNA, 581 bp, Homo sapien
  misc_feature (1)...(581): n = A,T,C or G
actcttgtccacagcagagacattgagtataccattggcatcaatgtcaaaagtgacttcaatctgaggaacacctcggggtgcaggaggtatgcctgtgagttcaaacttgccaagcaggttgttatcctttgtcatggcacgctcgtcttcataaacctgaataagcacaccaggctggttgtcagaataggtagtgaaggtctgtgtctgcttggtaggaatggtggtattacgcttgatgaggacagtcatgactccaccagcagtttcaataccaagggaaagaggagtgacatccaagagcagcaaatcttgaacattctcagacttgtctccagacaagatggctgcctggacagctgcaccataagcaacagcttcatcagggttgatgctcttattcagttcttttccattgaagaagtcttggagaagcttctgaatcttggggatacgagtagaaccaccaaccaggacaatatcatgaatctgtgacttgtctagtttggcatctcgaanggctttctctactgggtccagggtgccacggaacaggtcagcattcagttcttcaaatc

SEQ ID NO: 1541 - DNA, 333 bp, Homo sapien
  misc_feature (1)...(333): n = A,T,C or G
acgtatgtggcatttccaggtatgactgagtgtgagagacatgtnanaggctcttcagtgatttcttgctattgaccgatgcttcactgngccaaaagagagaaaaaaatgttgggttttgtaattaaattatttatatatttttgaaacccgaattgaaaatgttgcanncaacgggctacagctttattagtggttctctaactgtggtctccttgggccaagcaatttctttaaaggaaaagttgattatgtatgtggggngccaggaccactgccttgaaagcaagtgtgatttttatttttaatattattttatttgtgtctgtgtac

SEQ ID NO: 1542 - DNA, 136 bp, Homo sapien
accttagagttcctggccagagttgactctaggtagtgatgtgattttcttgggatgtttttctaaatattcttttatgctaaagcacatggcttgatacttctgttgattaagctcgtgtctacttacagtcatc

SEQ ID NO: 1543 - DNA, 401 bp, Homo sapien
acatattaagataaatgtcatgtgtaagataactgataaatattggaactttgctagaacaagaccctgtagtaatagtaataatagttgaagtttggccaactcttaataaagttattttggtaactaatgttttatggcacttaagaataattagcagcgttaaattttgtttgtattaagcacttttaattttatccttcctaaaaatagtttattgtatctgacaagaaacttacttaaccattgtgtccttcccatcttttttgtcatctttgttttcttcaaatgccctcctcccatctgccttgagattccctcgtcttcacttaaaagccagagtgcaagtcatgatttgcgggagggctcttgaaccacttctggctgcaccacaattctgt

SEQ ID NO: 1544 - DNA, 291 bp, Homo sapien
acatcggtctggccgggctcgccactgacgtccagacagttgcccagcgcctcaagttccggctgaacctgtatgagttgaaggaaggtcggcagatcaaaccttataccctcatgagcatggtggccaacctcttgtatgagaaacggtttggcccttactacactgagccagtcattgccgggttggacccgaagacctttaagcccttcatttgctctctagacctcatcggctgccccatggtgactgatgactttgtggtcagtggcacctgcgccgaacaaatgt

SEQ ID NO: 1545 - DNA, 259 bp, Homo sapien
  misc_feature (1)...(259): n = A,T,C or G
gaaataccttaggccttcagtcaattccgaagctccttcagttgtttttataatgggcgttttcacatgcacatatgtgtatgcatgtatacgcccatacagacatgcacacacagactcctactccattagctaacataccctccctctccacaacccctgtcacatacctttcaggaggtgacagttgtcttagttgtcatctacccagacaaacgtnctgggcccgtcctccctcctgatactgtagcctcttggt

SEQ ID NO: 1546 - DNA, 412 bp, Homo sapien
acacagtcaagctttaaagaaagtgtttgctgaaaataaagaaatccagaaattggcagagcagtttgtcctcctcaatctggtttatgaaacaactgacaaacacctttctcctgatggccagtatgtccccaggattatgtttgttgacccatctctgacagttagagccgatatcactggaagatattcaaatcgtctctatgcttacgaacctgcagatacagctctgttgcttgacaacatgaagaaagctctcaagttgctgaagactgaattgtaaagaaaaaaaatctccaagcccttctgtctgtcaggccttgagacttgaaaccagaagaagtgtgagaagactggctagtgtggaagcatagtgaacacactgattaggttatggtttaatgttacaaca

SEQ ID NO: 1547 - DNA, 204 bp, Homo sapien
cctttaggaccttgacagacaaatcgattacaaggtcaattcccaggatttcttcagggtgtgttcaggagtgtagatgttctttggatgacctttctactaaattagacctctgaaggagaaagctacttgccagaggctttccctgagagcattaggttggacaaaatctgactaaaatttaattactaaatgaaagtgtgt

SEQ ID NO: 1548 - DNA, 474 bp, Homo sapien
acttatttcaacaattcttagagatgctagctagtgttgaagctaaaaatagctttatttatgctgaattgtgatttttttatgccaaaatttttttagttctaatcattgatgatagcttggaaataaataattatgccatggcatttgacagttcattattcctataagaattaaattgagtttagagagaatggtggtgttgagctgattattaacagttactgaaatcaaatatttatttgttacattattccatttgtattttaggtttccttttacattctttttatatgcattctgacattacatatttttttaagactatggaaataatttaaagatttaagctctggtggatgattatctgctaagtaagtctgaaaatgtaatattttgataatactgtaatatacctgtcacacaaatgcttttctaatgtttttaaccttgagtattgcagttgctgctttg

SEQ ID NO: 1549 - DNA, 394 bp, Homo sapien
acgcgaaattgtgttatgactgatagccttcagctacaaaaagataggactgacctggtttaaagtgttctattttgtaaatcattccatttgagtctttctgatgaacttggctatactgaaatctgttattttagtgaggctccaaaatgagcaaagctaggcctgattagagtagagtgactattaaaaaacataactttctaggagctataaatcaaagttttaaaaagatgtttggatatatttgagtattccgatcatgaaaacagaaattgccctgcctactacaaggacagactgatgggaaattatgcacctggtcaacttagcttttaagcagacgatgctgtaaaaactaacggcttctctgatatttattgtaagttttagt

SEQ ID NO: 1550 - DNA, 572 bp, Homo sapien
  misc_feature (1)...(572): n = A,T,C or G
acagttaattagctcctgaagacaagttagtccaacctcaaagcacaggaagttgcacagcaggtgggggaaaacccagctactcacagttgtccacaaggggttagtggcctgaggtggtccttaggcaggagccacctgtcccacccattcacttgtcctgcctggccctagccctgaacaactgcaatgcagcacctctggaagtggcacattttatttcttttctaaacgctgagttgtcagggataaattttcaatagaaaaatctttcccacctgctgataatactttggtttttttgttttcctaaagataaagcctggagtcagcaaaatttgcttgcatgataagctagttgctttggaacaaacagaaggttgccgggtatttcttggagtagaattttgtagcctgccagactgagtttctcactggcatcaaacacacacttcatcataagggcggcaaagcccaagaattgaaacccacttgactggaaataccaggacccgaaggtggagagccaccctggaggaccacgtggtctgcaatgagctctncagtcaccc

SEQ ID NO: 1551 - DNA, 517 bp, Homo sapien
  misc_feature (1)...(517): n = A,T,C or G
accacgaagtcaatacttctcagtgagtagggaaggcaaaatacttcctcaatagcagggaaaaaaaagcaagagaaagactgaatttagaaaaaaaagacaactgttaaagaaaatgtttaagtcaacttttttttttttttanacaaggatattgcaactatcacttaaagtctggtggcacattctttagtaggtccttaaggcaatatatttaaattaatttacaatttgatttgatgttaaagtttttttaaacatcacctcaaaatanatgctcaaaataatgccctcacaatagcctttgntaaaatgtattcagaatgtttnntaaaaaataatgggtggctttatattacagtagtgctcattagcaccactataattaagggtctaccaagtttccagcaaaaccacctgtttcttaggagtttcaccataaaagatcacattggctttaaccagttgggtagcgcacaaaaaagcaatttttatcagttgctggtgctttttttgt

SEQ ID NO: 1552 - DNA, 397 bp, Homo sapien
accgtcagcatccacagccatacatcttccctgactctcctgggggcacctcctatgagagatacgattgctacaaggtcccagaatggtgcttagatgactggcatccttctgagaaggcaatgtatcctgattactttgccaagagagaacagtggaagaaactgcggagggaaagctgggaacgagaggttaagcagctgcaggaggaaacgccatctggtggtcctttaactgaagctttgccccctgcccgaaaggaaggtgatttgcccccactgtggtggtatattgtgaccagaccccgggagcggcccatgtagaaagagagagacctcatctttcatgcttgcaagtgaaatatgttacagaacatgcacttgccctaataaaaaat

SEQ ID NO: 1553 - DNA, 263 bp, Homo sapien
actaattaaggtattgaatttactgggttttagaaggctttaaaaaaaatccagataaatcaacaacaaaaatacagctcaactttgaactgcattaaaatccagaatctctcattttagatgaccattccttattcccctcaaaaggtttccaacagaagctatttcacaaactgattattagaatgtcttctccccactctccccaaaagcaagtatgcatggaagtgcatgcttttaaccttaagaaatgtatttttggt

SEQ ID NO: 1554 - DNA, 513 bp, Homo sapien
acattatctttaaggggttttctttttttcttcaatagatatcccaaatatacacacaatcctatttatttgggtctaggatgtaaatataatttaactgtgtgctaagtgctttaggtaacacaagcatttatctattgtaaaatgaaaattcaattgccatcaaataagaattttgatttcagtcagaaatgcaataaattatgccataaggaatatatttgtatacattttgtctcagatattttctcatgtggtattgtgaagggtaacaagtataatattatctgtaaagaatttaaaaaaatatttttaaatataactaatagtatatactgattttgacagttttctttccagaactcaaaacgaaagctatttttaaaaattaggtgattttgataactattaaactttaatcaatgcattaagaaacaggcagctggcgatctaatgcataagttgctctttccttactgtatttttcagaccacttgcgagtcagttctaggt

SEQ ID NO: 1555 - DNA, 211 bp, Homo sapien
actattttaaggagctatctgtttatgtagaatgattttgttaagagtaatgtaaactattattgagtagaggcctaaagaggactgtgcatttttgctatttaaaggaatcacaaatgatcatacttaagtgagcaaaaatgacaagttttactagctaagtagagaaataaatctcaaatgcagcgctacaattttcattatcttaagc

SEQ ID NO: 1556 - DNA, 303 bp, Homo sapien
gcaaacttgcactttcatttgctaatataaattcagttttattttaccattttagagactactaatgattaaatgtagaaggagagggtgcacatgtttttatgtggagtgtttaaaagataaatttataccactgtaatgtgcagcttttattaaaagagaaattggttgaactgctaggttgaatgagagacttcatctattggactattttttttaatccaggcatatggtctttagtaatggcttgtaatttgtgaaaacattaatttgggggttttccctgttttcagttgtccatgt

SEQ ID NO: 1557 - DNA, 133 bp, Homo sapien
acccatgtagactagcaaaatagtatgtagatgtgatctcagttgtaaatagaaaaatctaattcaataaactctgtatcagcccccaaaaaaaaaaaaaaaaaaaaaaaaaaaaaaaaaaaaaaaaaaaaaa

SEQ ID NO: 1558 - DNA, 505 bp, Homo sapien
acaattccagcagggaaggagctcaacactgaattctaaagctatgcacttgactgttttctttctccttgaccttttcatagcaggggtgaacaactggatgctgaggaggaaaaaactgggcaaattaaaggggaatgagcttcagaccccatgcagagctggctgtgagtccgggtttcactgctcaccagctgcatgaccttgagcatgtgacttccccactctgagttgcggtggcttcagtgcaacacctgggtggcggttaaaaacctcgtgatccacaaatgaaggcccttgttattagttggcaaaaaattaaggaaaaacaaagaacaccatggccttgaagagtgttgggcaggagactgctcctcctccggaggaaagtgaagacaggaggctgtcacatcgtctctgacatggagagtggcttccgggccatccgtaggggaaggacacagagctcttgagcccccttctagattcaaggttggcgttttac

SEQ ID NO: 1559 - DNA, 574 bp, Homo sapien
  misc_feature (1)...(574): n = A,T,C or G
acaggcgaagtgttctattgcatcacaagtgctagtgatgcagtaacagatccaagggcataatattaaatatgtttttttccaactgcgatttagttgaaaaataacataatacaaacatatattaatggctatcaagaccagcagtgatctgcagaatacctagaggcctacctaattagaaggttgaaacttagtaaaaccgtattaaagtcagtgtttttattcttagattaacaatgacagagtgagatatctttgattacaattttataaggtgtggtggggaattgagaggagacagatattggggaagactggcagtgtgtgctgagttagagtttgggaatgtggctcaaattagtcaatattgattaggatattgttttagaaaattttaaatgtgtcctaaattgtggcatattgaaaacgatattaaggaacaatgactcattagccctaaatacaatttaatgagtgccatcaatgggcttaagaaataagnagggatgggggatnnccgaggnaaaatgaggtgaaagagaaaatggaaagtggaaaatatgtttgaaca

SEQ ID NO: 1560 - DNA, 413 bp, Homo sapien
acctatttgacttaccatggagttaacatcatgaatttattgcacattgttcaaaaggaaccaggaggtttttttgtcaacattgtgatgtatattcctttgaagatagtaactgtagatggaaaaacttgtgctataaagctagatgctttcctaaatcagatgttttggtcaagtagtttgactcagtataggtagggagatatttaagtataaaatacaacaaaggaagtctaaatattcagaatctttgttaaggtcctgaaagtaactcataatctataaacaatgaaatattgctgttatagctccttttgaccttcatttcatgtatagttttccctattgaatcagtttccaattatttgactttaatttatgtaacttgaacctatgaagcaatggatatttgt

SEQ ID NO: 1561 - DNA, 549 bp, Homo sapien
  misc_feature (1)...(549): n = A,T,C or G
acatggcaattagaagttgtcatggcaaaagaaaaccacagctggcctgccacagccaacacaagaaccagaaaatggtagatgaaatgaaggaataaaggtggggtttattccttattataaaagaaaaaaaataattcttcagcagtcttaacaaagacatcaagatacaaaattacaagtgttttgactccagccctgtccccatctcctccaagagcagaggtaggagacagttgaagcaaacaagcaattctgtaaaaattacctagaaaccctacaaatttgattaaaatctaaacttctataattttgctttttaaaaaatttaatatcaaaaggcctgctttagtgacatgctattcctaccagaaaataaccccaataccccctctgtcagtaacatgctcaagttgaccagccaactcttatctctaaacctatgtggacaagtgtgtcttttaaaccaaagccacggagatcaagtgactgctagtaacgtgtcgtctgttaactaatccagtgcccaccttctncaganggtgggca

SEQ ID NO: 1562 - DNA, 522 bp, Homo sapien
actgctcggaggttgggttctgctccgaggtcgccccaaccgaaatttttaatgcaggtttggtagtttaggacctgtgggtttgttaggtacagtggcaagatcacacaatcttagcgcactgaagcctcaaattcctgcactcaagcctcagcttcccaagtagctaggactacaagcacatgccaccacacccagctaatttattttttgtagagatggaggtcttgctacacttcccaggctagtctcaaactcctgtcctcaggtgatcctcctgcctcggtctcccaaagcactgggattacaggtgtgagccacagtgcctggccctcttaccagattgtttttgttttgttctatttttctgtttgttttttttaatgacagtttatatggtcaaaggaaacatggacctttctatatatttgtctttcaacttctctatattgctcaatattacatattaaattatattcctttaaatatttctcatcctttaataatgaggatgctaattaa

SEQ ID NO: 1563 - DNA, 346 bp, Homo sapien
acgctgaaacacacacatgtaacagctattaggacactgtaaccgtcctctgtgtattttaaggccaatagtaacagagaggagggaaaaaaataactaccaagaaaataaaactaatgggtagattcacactaagaaaatctaggtaattatataaattcattgttatgaggttgtagaaaggacagttatctcacgacatatggaaaattggtgaatttcctgtgagactatgatttatgcttttgtgaatgtatacctgatctaaaaataaatgttttgtctaattttagacaaaacatttatttttagacaccaactaattggaaaatataaggaaagaaat

SEQ ID NO: 1564 - DNA, 215 bp, Homo sapien
actacaagcccaccaagctaaagaggctgcccagaaagcagttaacagtgccaccggtgttccaactgtttaaaattgatcagggaccatgaaaagaaacttgtgcttcaccgaagaaaaatatctaaacatcgaaaaacttaaatattatggaaaaaaaacattgcaaaatataaaataaataaaaaaaggaaaggaaactttgaaccttatgg

SEQ ID NO: 1565 - DNA, 562 bp, Homo sapien
  misc_feature (1)...(562): n = A,T,C or G
acagattgggcggaatgtggagaaggttggccacagtccagagccaggagcccatggaacaacttggaaggtgactcaggtgaggctgtcaatgagggaatcccgcatgctggtggcaatggtgctaggctgggcttcattcagcttgaagacactctccaccactgacagctctgtgctggttgtgtccaggccacagaaggcacaccagtcattcaccaccatcccagcagcaatcacctcactgcctcggttcacagtccccgccacaagggggacttgaagaagagaggacagctcatcctggtcttcaattgaagtcttgggatacaccagccctccctgattgctgaagacacagtagcttcctactagcacctggtcgaccactgtctgtctgaagacttccaccttgagcacatctgccagaatttcttctgtctccctgtccaagtctgggtggaccaaggccacgtagtcattgcaggtggtgacattgcccaaggctgagagccgctcctncacccgcctaatctgcactgtgtctgggaggctgttgcga

SEQ ID NO: 1566 - DNA, 147 bp, Homo sapien
acctaagtggtgtgatgtaaatactggaaacaaaaacagcagttgcattgattttgaaaacaaacccccttgttatctgaacatgttttcttcaggaacaaccagaggtatcacaaacactgttactcatctactggctcagactgt

SEQ ID NO: 1567 - DNA, 339 bp, Homo sapien
actcactgttcttcataaacaccagctaaaaactggtataaaaaaaaagaaaaaaacccccaaatcatgggattcatacaaagatgactgagtgggggcaaggaagactcaacctaaccagcattttaccaaatctgtcatgtttgaatcgtgagagctccatggaagaaaggagatgctaagtagcgcttcaaagcttcagaccacaaccaaaacacagcaccatttcaaatagaagcagtagccaaacactgctcactttgatatggttcaaggatgctgacatcaatatttatctgctcattcatccaggaagaaggggacatcagttactactgt

SEQ ID NO: 1568 - DNA, 337 bp, Homo sapien
acaccacctccaaaaataaaaaatggaaaacacacctttagtgaagtagaagtatttgagtatcttgatgcagtaacttatagttgtgatcctgcacctggaccagatccattttcacttattggagagagcacgatttattgtggtgacaattcagtgtggagtcgtgctgctccagagtgtaaagtggtcaaatgtcgatttccagtagtcgaaaatggaaaacagatatcaggatttgaaaaaaaaattttactacaaagcaacagttatgtttgaatgcgataagggtttttacctcgatggcagcgacacaattgtctgtgacagtaacagt

SEQ ID NO: 1569 - DNA, 574 bp, Homo sapien
  misc_feature (1)...(574): n = A,T,C or G
acaacactgactgctcagacacatttaggttcagggtggacctttatgtcttgtcaagatgcctaggcccggctgggcgtggtggctcacacctgtaatcccagcactttgggaggccgaggcgggcggatcacgaggtcaggagttcgagaccagcctgaccaacacggtgaaaccccgtctctactaaaaatacaaaaattatccgggcatggtggcacatgcctgtaatctcagctactcaggaggctgaggcaagagaatcgcttgaacctgggaggtagaagttgcagtgagccaaaatcacgccactgcactccagcctgggcaacagagtgagactccgtctcaaaaaaaaaaaaaaccggatgtctaggccaatgataattatttttgatgcagtgtggattagttcttttgttaaccccactgtcttggggaatgatgccagctgggaaattgagtttttgactgaaacatggagccttcactgctttttttntggttcctatgaagatttggaacatagaaaacacaaaaacttaccttaaaatttgagcaggtcgttgatggc

SEQ ID NO: 1570 - DNA, 599 bp, Homo sapien
acaccaccataccttttcccagaatacccagaagcaagcaagaatacaggtcagaatagggaggtttcaattctgtatccaggggccaaagaccaacgccaggggtccctgcttcctgaagaattagaagatcagatgccaagattggtggcagaagaatctaacagaggtagcacaaccataaacaaagaagaagtcaacaagggaccttttgtagctgttgtgggtgttgccaaaggtgttagagattcaggagctcccattcagctgatcccttttaacagagaggagcttgctgagagacgaaaagcagttgaatcctggaacccagtgccttattctgtggcctctgctgcaatccctgctgcagccattggggagaaagcaagaggctatgaggagagcgaaggtcataatacaccaaagttgaagaaccagagagagctggaagaattgaagagaaccacagaaaaattggaacgtgttttggctgaaaggaatttgttccagcaaaaggtggaggagctggaacaggagaggaatcactggcagtctgaattcaagaaagtccaacatgaattggtgatctacagtacctg

SEQ ID NO: 1571 - DNA, 122 bp, Homo sapien
  misc_feature (1)...(122): n = A,T,C or G
actatagggtaaatacgggccctatttnaaagatttttaggggaattaattctaggacgatgggcatgaaactgtggtttgctccacagatttcanagcattgaccgtagtatacccccggt

SEQ ID NO: 1572 - DNA, 262 bp, Homo sapien
acttaagtcctagatgtccaagaaagacagtatcttgtctcagagtttacaatcctggggaagagacaggtgatgaaacagcctgacagacccaaatgtatttcagagacaatcacaaggtgtaaggtgcagataaaagaggcatctaagacctgtggaatttggcttcaccaaataactgggtatttagttaaaacataaatgcccttgtggctatggtataactttttgtaatatgtccagcacaccaatcacatactgt

SEQ ID NO: 1573 - DNA, 619 bp, Homo sapien
  misc_feature (1)...(619): n = A,T,C or G
acaaattcaagtgcggaattattacgccattttaagtattatctacttttttaaaaaatcacagtggtcttcatcacatggcgaaaaaacaaacttcactcttctccaaagggataagtccatcctaaatgtaactacaaacaattgtataaacctttatagtttttccccctaatctactaaacatattccagtgtcatttagtagttttacatagaatctgcactatacttggatactcagggaaaataagatgacatatattgtagttttagaacgcaaaagagctttcattttagacaaatatacaacatagaagccactaaaaaatatgggtctattaatcaagagcccatttcaaaatgataagagcatttagtatgtagatctggaatgcacagtttctggaagtattagaacttagtgttaaacagtgcccttataccctcttctaatactgtagacacctaccaaccagatttgatttcccctaattntatnatttccatcagaaaaccaaaaacagattattggggatccacctgtaactgaccagagcaaaaagtttttaagacttccgtttgtgtgttgcaacttttacattcaaaaccagatctct

SEQ ID NO: 1574 - DNA, 214 bp, Homo sapien
actacaagcccaccaagctaaagaggctgcccagaaagcagttaacagtgccaccggtgttccaactgtttaaaattgatcagggaccatgaaaagaaacttgtgcttcaccgaagaaaaatatctaaacatcgaaaaacttaaatattatggaaaaaaacattgcaaaatataaaataaataaaaaaaggaaaggaaactttgaaccttatgt

SEQ ID NO: 1575 - DNA, 98 bp, Homo sapien
  misc_feature (1)...(98): n = A,T,C or G
acaagcttttttttttttttttttttttttttttttcttttttttttttttttttttttttttngcccaaaaacttccattgtnttaatcaggagtta

SEQ ID NO: 1576 - DNA, 419 bp, Homo sapien
acctctacagagaccaaaactcattctcttaaagagattttatggggctactgcagataaaaataggacacaatattaaaggagctacagaaggaagggagtcccatctcaaaaaaaaatgaatgtatgccactgcaattagagtatccaataaaggagacagtttagagtcaggacagaaaagcttccataattgaactagattacataatagtatttctagaaaaagagatatttttagattgtatgccacttttgtttaagaactgtgctgtgatcactgtattaattttggtttatcttggcatatatccttcagtttgtttttatttttaatttttcctttttttccgattaggctttggtcagcatttttcatttaaagaaaagtaacactcccatccactcataagcttggt

SEQ ID NO: 1577 - DNA, 546 bp, Homo sapien
  misc_feature (1)...(546): n = A,T,C or G
accaactctaagccacactggactaattcanatggaggcatactttccaaactaatcagatgcctaataaagtgttggagtatacgtgtggacatgtagaagggatagttgcgaatgtctgaccttgtggaaatttccaaagatgtctacccataaacggtaattggcagtgttcatgactgaattaaatttagtcttttgaatcttgtcagacaaggatcccagagtgattctggcacatcactcttcttatggataatctacccacccagaagataaaaccctcagtaaatctgagatagtttttaaaattacaagaatatttagcaaacttcaagtgagtanagtatataaaaatgtaagctggaaaaagcagcctttgaaatgagacactagaatatctttggtagataaaaactctattatttcaaggagagagtttttgtttctggaaagtgctaagttgtgtaacataaaaggcattactaaattcaggtgacaggtaaaagaatattttttttaagaaataataaaccatgcatattg

SEQ ID NO: 1578 - DNA, 88 bp, Homo sapien
tttttttataagattattagtataaaaggggagataggtaggggtagcgtggtaagggtgatgagtgtggggaggaatggggtgggtt

SEQ ID NO: 1579 - DNA, 334 bp, Homo sapien
acacaaggtcccaaaaagcgagacctgccatgacaccattgctgtgattcacatgggaggtaataggattggatcggggtgacagtgatggaggtgatgagatgttgttgcatttgggtttatttttaaggtagaacaagatttgctgaagaatgagattttggtgtgaaagacagggattaaggatgactccaagtttctgggcctgagcagttgaaagtaaggaatggccattaactgagatgagaagactataggaagaatggggtttggttcatggaggaaggtcatgtttggtttggaatatattgaatttgagatacccattatctgt

SEQ ID NO: 1580 - DNA, 541 bp, Homo sapien
  misc_feature (1)...(541): n = A,T,C or G
acatctgagtccaaagtgtatctgaatgtgtgctctgaccttattcttaaatgttttctccccatactttatagccatttattttttaaacaccttaagaaggaacgaaaaagttctcttggatgacgtatattcaagtctgagccaaattgaggattgtgtctaggaaatctgtaaagccatactactgtgttcattagcatgagcaatttaaaatgaaaatgaattaaaaagttaaacatgagtttggttttaattttggggggatcttaagatatatttctgggagtaggatagccactgaaaataattttgaatagatgataaagtacctgcccgggcggccgcccgggcaggtactgaccagcaaaatggagaagatcagagaatgcagcagcagttttttttcttgttttcttaccactttattctttcagagtttaaagaaaatggactcatgcacagaacactatgcattttgaaacttgttcatcctggatttttttaaatnatttttatctcanaacttanacaaaaatta

SEQ ID NO: 1581 - DNA, 352 bp, Homo sapien
cgttgcgttccaaggcatctgtgagcccgcggagtatacaccatgagcaaagctcaccctcccgagttgaaaaaatttatggacaagaagttatcattgaaattaaatggtggcagacatgtccaaggaatattgcggggatttgatccctttatgaaccttgtgatagatgaatgtgtggagatggcgactagtggacaacagaacaatattggaatggtggtaatacgaggaaatagtatcatcatgttagaagccttggaacgagtataaataatggctgttcagcagagaaacccatgtcctctctccatagggcctgttttactatgatgtaaaaattaggtcatgt

SEQ ID NO: 1582 - DNA, 350 bp, Homo sapien
ggttttaagaagaatgccattgaacacccagttcgaaccaatcagattccacgtcagattcctgaacagtcgttctacacgaagcccttgcctggtattatcatgggagggattttgccctttggctgcatctttatacaacttttcttcattctgaatagtatttggtcacaccagatgtattacatgtttggcttcctatttctggtgtttatcattttggttattacctgttctgaagcaactatacttctttgctatttccacctatgtgcagaggattatcattggcaatggcgttcattccttacgagtggctttactgcagtttatttcttaatctatgcagt

SEQ ID NO: 1583 - DNA, 366 bp, Homo sapien
acagcttctcaaatcatgttagaagggtctcacattcaatgatcaagaaattttaaaatagcagtaattattttcattttaagaaaaggttccctttctcccctcccaccccaagtatttaacatgaaagaatgggcttccttacatattaattttatacttatttttgaagcagcaacaattaaccatcaatttggcatttctgtttacagtcgctacaaaaatttttttaatttcacaaagccattatccagtgttgccatgaaacagagactgtaaattctaggtagctaagattctttctgaaaccaatgttaagtcaaagaaatataaagcagggcattacactaagtttctggatctagt

SEQ ID NO: 1584 - DNA, 561 bp, Homo sapien
  misc_feature (1)...(561): n = A,T,C or G
acaaaatagctgcaaaccaagcatcagtcatttcacaccagcatctctccaaacaaaagcaattgtgaaaatgtgtttacttcagaacggcactacataaatgtgaaaagttgttgatcttgaaatatctcaggatagcacttttggcaaactcttagccaaggcttcttcattggtgctgttataagatggtgtcctattttcttgtttatacgttcattctgtttgttattgctactatgtaaaactttcacatgcaaccaatgtatatctgagtttgaagatgtttatatagggtattttttccaactgcccctgcattgtgcctgaaccaattgaatcttatgtatgagtttcatttgttttattaatgttaatttaaatctgnaaataattgctttattgngatgngatacagaacaaagtgttcgtttttgactgaaaatagtagatcagaaatctcagtttaatataaaatgagctaagttttttaaaaataaatnataaacttgganannagaaaaataaagcagttgctgtagaatangctgtatctttttc

SEQ ID NO: 1585 - DNA, 545 bp, Homo sapien
gtagaagcaggaggttttcaacctagtcacagagcagcacctaccccctcctcctttccacacctgcaaactcttttacttgggctgaatatttagtgtaattacatctcagctttgagggcccctgtggcaaattcccggattaaaaggttccctggttgtgaaaatacatgagataaatcatgaaggccactatcatcctccttctgcttgcacaagtttcctgggctggaccgtttcaacagagaggcttatttgactttatgctagaagatgaggcttctgggataggcccagaagttcctgatgaccgcgacttcgagccctccctaggcccagtgtgccccttccgctgtcaatgccatcttcgagtggtccagtgttctgatttgggtctggacaaagtgccaaaggatcttccccctgacacaactctgctagacctgcaaaacaacaaaataaccgaaatcaaagatggagactttaagaacctgaagaaccttcacgcattgattcttgtcaacaataaaattagcaaagttagt

SEQ ID NO: 1586 - DNA, 541 bp, Homo sapien
  misc_feature (1)...(541): n = A,T,C or G
acacaatggtttattaaaggaatgtatggcccacatcaacctagcaaggattctactggtaaaccttcctatggccaaaggaaaaacaagcaggagttgagtggctggggtggggtgcaggcaatggagagagggcagaagggtgtagaagctgaaggggtctagaagcttactcctgagtttcttccttctgtcttcaaatctttacttcttatggccaaagacccagcggtttcataggctggagatgcactcttctanactgctcgagacagccagagacaggggaggagggaagaaggatactgtggaaagggatggcggggcaaacatttagagctagaagccactactgggccaatgctaaagtttctgtctctaagcctaaaaaagccagtgtagtagggcccttatcactcttagtttgctaggtttcccctctgaaataatgagcagatttagccaggctagcagaaaggaagaggacggggctgtgcaggagttagcagaatcttgattcttgctctatggtcggtacctc

SEQ ID NO: 1587 - DNA, 374 bp, Homo sapien
accttagagttcctggccagagttgactctaggtagtgatgtgattttcttgggatgtttttctaaatattcttttatgctaaagcacatggcttgatacttctgttgattaagctcgtgtctacttacagtcatctagtgagaacctgtggtgtggtgagatgataacttggtctttggtcttcatcatttgaactagttttggttttgtcttgtcccttccttgagcattttgtgtgtgtttaatcctatttggtaaatgaaccactgtgaaagaccaagttggagaaaacagaacacccccaaaacatttattttttttttagaaaatcatggctcactatggtagtatacaatattgttttcacacatgt

SEQ ID NO: 1588 - DNA, 556 bp, Homo sapien
  misc_feature (1)...(556): n = A,T,C or G
gaagcagagaatttggggcttctgagatggctggagtttgtggggcagaataagggggagaagaaaaaaagagctccagaaatctgcaaaaggttccccttaagtctttgatcaaatactaagcttgtagataacagcttacaaggcctagtagaaaagagctgcaaaggagaggtgaactggagattttatagattactaggagataaaagttctggacaagcgagtggaaaccttactgaactccttggacactccattgacatctcagaaagaccacagtttaggggtagggccaaagccatagagtaaaagctactctagacccaaactaataagcttaaaaacaagcctcaaaaggatcaaggtgatttgccagtattttgactgcttgtggaaacaaaactcaatatattctctaaagataataaaatctctatgtncanttatgtagcaactataatgttcancatgcaatgagaacttttctagatacncnaagaattangaaaatataggttaaaaanagggtggnaaaaaaccacaacagtcaaca

SEQ ID NO: 1589 - DNA, 510 bp, Homo sapien
actttcaacacaccgtggacaggggaggaaatgggttctgcttgctgaccaccagcttctgatgctgatgcgatatgtagcctttgacgtgtcccatgtatatcaagttagccagaatacactgaacttcgtcaatgtccacgtcctccacctgcatgaacttcaaggcaaccagaaaagcatccagagacagctggtgtgttttcagtaacaaatacactttcttaaagaggttcctgtaggtgatgatcttcagcttctccaggatgaggaagattccgcagcgaatgaagaaggcctcgtgcttcgccagcgcctcgtgcagcagcagcaggttgccctcgctcacagctctggttacttccgcaaactgcatcaggtgatgctttttcaggagctccacagtgggcatgtgacccaatagcatttttactggaagcaaatagatcagaatcatccttttgttcttctgactagaacggtgacaatgctcaaaggcaaatgacaggt

SEQ ID NO: 1590 - DNA, 180 bp, Homo sapien
actcacaggcttcttctgccagggacatccgttaaatattgttcccccaccactgagtcctggagctatagatggtcatgacagtgtggttgacaatgtctccagccctgaaacctttgttatttttagtggcatgcaggctatacctcagtatttgtggacatgcacccaggaatatgt

SEQ ID NO: 1591 - DNA, 261 bp, Homo sapien
accctgaacggctgtgctctccacccttgtatcggtgagtggatcttgtctacatcagccgtaagcctagaagcagagcgggatcgaggcgtttttaataattcgagttgggaagacccggatggttcatcaaaatgatggtgttgagcacccgggaggcagacattgggtatttgttcacaattttgcacctgtaagaaaatgttcctttataactttcaaggattgccgtgagcgtctttggggccttttcattcatgt

SEQ ID NO: 1592 - DNA, 591 bp, Homo sapien
actcctgccaaggcagctcccaccgctatgggcacaaggaagttgtcgtcatctgcactgcagtcttgagctgtagaatactttccttgtgtcacattgaaaggctgaacccttagatcaaaggtatttatctgaaatgctccagacactgaaacagtctgctctttgttgcacatataagaacttcccaggggggcatcccagtagctgagattgttatttgcaatgctgaaaacggagccattaaccaaatacatgctgatgttcacttccttcagataaaatcggttttcatttttcacagcaaagacaaagtctagatacttaatggtgctgctattgagtctaagtagagcagtgtgagaacggcagctgcctgtggagtgagttgtattggggttgatgttaataactgaagcaaccttatcctgagtgatgttcagctgcagccccatggtagccagcagacaagtatcattgccattattaactgaataggttccagcttctggtttttcctttggagtaggtgttgtagtaggagatggcacagtggtgtgtatggtgggtgccactgttgaagttttgtct

SEQ ID NO: 1593 - DNA, 358 bp, Homo sapien
  misc_feature (1)...(358): n = A,T,C or G
accctctttcccttcccaccccccaattaaaggcaaacaatggcactttgctcttgcttaacctagattgtcttcaaaaactattaaaatgtaaaagacttaacaaaaaaacaaaaagacgtttaacagatgtcaaaaagctccttagtgtttgaaaataaatgcttaaacaaaagacaacatattttatatcaaacaagtttgaagagccctgaattgcagcattctgtaacataaacaaacaaaaagctggtataggatttattgtcaaaggcagaatttcttcangcaggtaagtnaggaggtggtggttctttttcaggcattttcacggccatttcataggttggcaaaacgt

SEQ ID NO: 1594 - DNA, 257 bp, Homo sapien; identical to SEQ ID NO: 1267

SEQ ID NO: 1595 - DNA, 257 bp, Homo sapien
actccctgctgttccgcaggacctccaccttcgccctcaccatcatcgtgggcgtcatgttcttcgagcgcgccttcgatcaaggcgcggacgctatctacgaccacatcaacgaggggaagctgtggaaacacatcaagcacaagtatgagaacaagtagttccttggaggcccccatccaggccagaaggaccaggtccacccagcagctgtttgcccagagctggagcctcagcttgaagatgatgctcaaggt

SEQ ID NO: 1596 - DNA, 526 bp, Homo sapien
acttaaaataatttcgtatattaatgcgcttttatttttattttttcttttaggaagctatcatacaaataatgaaaatgagaaagaaaattagtaatgctcagctgcagactgaattagtagaaattttgaaaaacatgttcttgccacaaaagaaaatgataaaagagcaaatagagtggctaatagagcacaaatacatcagaagagatgaatctgatatcaacactttcatatatatggcataattttgaatatcatggacaatatttagaacccaaattttggagtgcttgggcagaaagttgtaaagtttgtgctggagaaaggtttatttggactttgattacataaatattaaaatctctgccttaccttacaaaaacaactatattttgccaatcacattagttagcatgatggcattcccttcatgttgcacactctttgacagcatgctgttttgtggagaaacttgcattcatgaagagcccattatcaacttttaaaagtgaatttgatttgt

SEQ ID NO: 1597 - DNA, 255 bp, Homo sapien
actatatctattgcgccaggtttcaatttctatcgcctatactttatttgggtaaatggtttggctaaggttgtctggtagtaaggtggagtgggtttgggggaaaggaaaaggcttaccaggctgctatggtcaactcttcagaaattttcagagcaatctaaaagcgccaaaattcgctatgtttacagtgatactattaagaaaatgaatgtgattctgctctgtctttttaggtatgatcaaataaaaaat

SEQ ID NO: 1598 - DNA, 250 bp, Homo sapien
acccatattgttaatgctaggatcaagataccacatagccagaacaagaagttgaaggtaaacatagaatattttatacaggcactcacacctgccatttcggaaaaggattaggaatccagatgccgtgaatttaactattcgttacaggcttgtcctgcaatatgctctggagcaacttgcctgcagagatttctgtatccacggacatttaaatatcgcaaaggctatctccaggcaagtatgttcc

SEQ ID NO: 1599 - DNA, 443 bp, Homo sapien
  misc_feature (1)...(443): n = A,T,C or G
acacactatatttacatcacccaccctgaaaacagcaggttctggcttttccgtgaacccccagatgaatataaattggagcctctgagaacagttccttccccagagcggggagtgtgcacgtgtgtgtgtaaccttctgattccatgggacctggccagcccctctggagccacacagcacctccttgccttacaccctggctccagcttcactggtccgggggacgcctcagcctggggcagctgtgatgtaaaccagttactccacctccatcttcctcttctgcaaagaatcgaggaagtcttgccactctgctgggtaaaagcgttttatagacgttgatcttactccgaatctgttttggggtatnttgatagtaattcttctcatcacgggccatggccttatagncctccccgtggttctctaccatgtagcgt

SEQ ID NO: 1600 - DNA, 201 bp, Homo sapien
  misc_feature (1)...(201): n = A,T,C or G
tttcctccaggntgtaatangcgtagaccttgactgctccaggctggataagctctacattaaagtattggnnaactttgaaagctagacagtcatcctcagagtgtgagaccttgtccaggtagatgatgagggtgttcctatcggagaaggctttgtccagctcatacttggagatgtatctgtcaacaccattggcca

SEQ ID NO: 1601 - DNA, 542 bp, Homo sapien
  misc_feature (1)...(542): n = A,T,C or G
accaaacgggcaaggacatctctacaaattactatgcgagtcagaagaaaacatttgaaattaatcccagacacccgctgatcagagacatgcttcgacgaattaaggaagatgaagatgataaaacagttttggatcttgctgtggttntgtttgaaacagcaacgcttcggtcagggtatcttttaccagacactaaagcatatggagatagaatagaaagaatgcttcgcctcagtttgaacattgaccctgatgcaaaggtggaagaagagcccgaagaagaacctgaagagacagcanaagacacaacagaagacacagagcaagacgaagatgaagaaatggatgtgggaacagatgaagaagaagaaacagcaaaggaatctacagctgaaaaagatgaattgtaaattatactctcaccatttggatcctgtgtggagagggaatgtgaaatttacatcatttctttttgggagagacttgttttggatgccccctaatccccttctcccctgcactgtaaaatgtgggattat

SEQ ID NO: 1602 - DNA, 94 bp, Homo sapien
  misc_feature (1)...(94): n = A,T,C or G
angcgtccttcaggtaatgaacttcagctgcagtgtgaaaggggcaggaagactggcagctgtcaaaactggaacagtccantgagtatgtgca

SEQ ID NO: 1603 - DNA, 378 bp, Homo sapien
aaggagcctacaggccacttgaggaaattctctggttttgctgcagcttcgcttcaaacttccacagcagaagagttggaattctaatgccgcaatatcgttgtaataccagggattctctagaggcaagttaaggctttctgggcaaagaaaacaattccagatgatattgtgatagaatgctacagtgaaatgcttcttaatgactctcctgtcctgcctaaaggacaaagacctatgagtgacttcaacttgacgtgatgtttcagtgatctttacttcagctctaagtcagaatcaatgccacaggaaaagaaaagcttcttacatctcagacatctgcttgctgagcaaacacaaacaagaacacctgcccgg

SEQ ID NO: 1604 - DNA, 285 bp, Homo sapien
acttctcatgagttatcactcagttttgcttctagagacccaccagtcaaagcagtaaaactaaatctccttaacaaaactgaagtcttcagaaaagcagtgctaaatgggtgatgaaaccttacttaaccactccctgtatgcaagatgacttattttgcattcctaaaacttctactttgattctcaatatatccgttttttttttctttttttcaaaagcattattttggtgaaaatcccaatatatgagtttaaaaaaaaatcattaacatcattaacagt

SEQ ID NO: 1605 - DNA, 546 bp, Homo sapien
  misc_feature (1)...(546): n = A,T,C or G
agcgtggtcgcggcgcgangtaccaattatatcatctcagtcttgaatttactcacgctgattgttgaacagataaatacgaaactgccatcatcatttgtagaaaaactgtttataccatcatctaaactactattcttgcgttatcataaagaaaaagaggttgttgctgtancccatgctgtttatcaagcaatgctcagcttgaagaatattcctgttttggagactgcctataagttaatattgggagaaatgacttgtgccctaaacaacctcctgcacagtctgcaacttcctgaggcctgttctgaaataaaacatgaggcttttaagaatcatgtgttcaatgtagacaatgcaaaatttgtagttaaatttgacctcagtgccctgactacaattggaaatgccaaaaactcgagtctttaattgtaatgactttgttttatccacagttaagccttttctcattacatatttatgtatttcactgtcatgtcaacatgtctgcagaatcactgtatgtaacaaacagccatattt

SEQ ID NO: 1606 - DNA, 582 bp, Homo sapien
actggagatgtatttgataaccaaggttttaggtaaattttcaccagtattagttctatttgcaaactgaaaaatgttgtaggcttaatataaaataaccacattagtgaacattatatctcttagaagaaaggccatattttgctcctgcttctgtaaaaatattatttgtttgaaggggaaataatggtagtgtgacctttcacttaattcctactcccttaatgtgagagagacaaaatgagctgaagaaggaaaattctggagttacactccacaaccttgaacatactgacggacatctctgttttgacaacgatttctccatgccacccatgctctaatgccttgtggatcacggacaaccctctttgcacaagctacagcatcagcgatgttatcttgcagcaaagcactgcaggataaatgacaggcattaactgctcctggggttttgccatcattacaccagtagcggctattgatctgaaatatcccataatcagtgcttctgtctccagcattgtagtttgtagctcgtgtgttgtaaccactctcccatttggccaaacacatccagtt

SEQ ID NO: 1607 - DNA, 257 bp, Homo sapien; identical to SEQ ID NO: 1267

SEQ ID NO: 1608 - DNA, 103 bp, Homo sapien
acctgctttggcaatcattgcaactctgagattataaaatgccttagagaatatactaactaataagatctttttttcagaaacagaaaatagttccttgagt

SEQ ID NO: 1609 - DNA, 59 bp, Homo sapien
  misc_feature (1)...(59): n = A,T,C or G
ggtgaagtaagcctgtgaaggaccancatgggaatcctatactctgagcccatctgcca

SEQ ID NO: 1610 - DNA, 445 bp, Homo sapien
  misc_feature (1)...(445): n = A,T,C or G
acagcgggttgaaacaatttntctaggtgagcacccctgtgacagagganaacaagtnactctcttcctcttnaatgattgcctanagatagcaagaaaacggcacaaggntattggcacttttaggagtcctcatggccaaacccgacccccagcttctcttaagcatattcacctaatgcctctttctcagattaagaaggtattggacataagagagacagaagattgccataatgcttttgccttgcttgtgaggccaccaacagagcaggcaaatgtgctactcagnttccagatgacatcagatgaacttccaaaagaaaactggctaaagatgctgtgtcgacatgtagctaacaccatttgtaaagcanatgctgagaatcttatttatactgctgatccagaatcctttgaagtaaatacaaaagatatggacagt

SEQ ID NO: 1611 - DNA, 313 bp, Homo sapien
acttttctatgatgacccgggccgccttcttcacggttttggtgcgaacgcggcacgactgagcaccaggcctgagcgaccacctccctgttcaggcccagcctctggagttcattcctatcaatgtcattttgattgtgcagtaagatgaaaatttgtcattacaatagttacagtgacagagaaatgcacactatgaatcaaatagcaaggaaatgaagcaaattataacacagtgtggcaacgcacgagcaagtaaccattagagtaacattactttgtccagtaaatgcttcagttccaccacttgtac

SEQ ID NO: 1612 - DNA, 106 bp, Homo sapien
  misc_feature (1)...(106): n = A,T,C or G
tacaccttggagtccaccgccaatataaataatacacatcacgattccatgatggtgcaacaatngcaatttaagtgaattcaacatttaaaccttttctgggcca

SEQ ID NO: 1613 - DNA, 503 bp, Homo sapien
acacaacaacatttttggaaggacatataaagtgaatacaaccaaatatattaaaatggtttcaattaccagcattgaaacagtgcaaaaaaaagccaaatacaattgcacagatagtggactcccttagatcttgaaagtgaacttgattcctgacctctcccattgtcactccaagtgaaaaatgaaagcatggggcttttcttgcttcttggttagtatgagacattgtgttcatctgagagcaaaatcaacactagcatcacagcagaagtgcccatttcagcaaatccggtaaaaattgtaagttggcatcaagggaaccaatggataccttagggcactggcaattctcaatacatagaaatgcttgagggttgtgtcggttcccctggccacagtttgtcaggttgtttagccagatgccccattggtaaggtagactgaaatctcggtttagggctgaccccaaaagaaacagtctggttcgtgctttggtatgg

SEQ ID NO: 1614 - DNA, 81 bp, Homo sapien
acttgtaattagcacttggtgaaagctggaaggaagataaataacactaaactatgctatttgatttttcttcttgaaaga

SEQ ID NO: 1615 - DNA, 185 bp, Homo sapien
actgctacttagtttctaaggctgcacagggaagggaaagactgggctttggacaatctagaggtaatttatatccgcccccaggtggagcaacatgcgattctggaggcacgggggtaactgaaagtgagtaaaaaaaaaaaaaaaaaaaaaaaaaaaaaaaaaaaaaaaaaaaaaaagcttgt

SEQ ID NO: 1616 - DNA, 419 bp, Homo sapien
acatttatttcctaatttatacatgatttttggtgttaatatatttaatgattaataacagaatgtttatttaatgtgctgtccatttttatgtaatattatggggaaagtgatgccagcagttccttttcattattctatcttctgtcatatgaatgttgagcaaagcttaggccaacatgaattgtttgtgaagtgtggttgatggtgctttgtttttttctgactacttctatggaaggccagtgaagaagcaaaggaagacatgaaaattgacgctcattcttcttcctattgttccctgacatccagcaaattgtgaatttgaaaaatgatggccagttttcagaagtgctgacaaattcatattggtatgcaaaagctcatcacccattaaggtttgttgttgaatcaacagt

SEQ ID NO: 1617 - DNA, 545 bp, Homo sapien
gtcgcgcccgggagtccgccgcctgcaccaggatggagttcgtgaaatgccttggccaccccgaagagttctacaacctggtgcgcttccggatcgggggcaagcggaaggtgatgcccaagatggaccaggactcgctcagcagcagcctgaaaacttgctacaagtatctcaatcagaccagtcgcagtttcgcagctgttatccaggcgctggatggggaaatgcgcaacgcagtgtgcatattttatctggttctccgagctctggacacactggaagatgacatgaccatcagtgtggaaaagaaggtcccgctgttacacaactttcactctttcctttaccaaccagactggcggttcatggagagcaaggagaaggatcgccaggtgctggaggacttcccaacgatctcccttgagtttagaaatctggctgagaaataccaaacagtgattgccgacatttgccggagaatgggcattgggatggcagagtttttggataagcatgtgacctctgaacaggagtgggacaagtac

SEQ ID NO: 1618 - DNA, 107 bp, Homo sapien
  misc_feature (1)...(107): n = A,T,C or G
tttaaaaatactnngatttccttcatactgggccaggaatttgacgaagtcactgcagatgacaggaaagtcaagagcaccataaccttagatgggggtgtcctggt

SEQ ID NO: 1619 - DNA, 400 bp, Homo sapien
acaagtccaaagtttcactgaaaggcaatagagaaagtgatggatttagagaagaaaaaaattataaacttaaagagactggatatgtagtggaaaggcctagcactacaaaagataagcacaaagaagaagacaaaaattctgaaagaataacagtaaagaaagaaactcagtcacctgagcaggtaaagtctgaaaagctcaaagacctctttgattacagtccccctctacacaagaatctggatgcacgagaaaagtctaccttcagagaggaaagcccacttaggatcaaaatgatagcgagtgattctcaccgtcctgaagtcaaactcaaaatggcacctgttcctcttgatgattctaacagacctgcttccttgactaaagacaggctgct

SEQ ID NO: 1620 - DNA, 231 bp, Homo sapien
acatagatgttgaatgaatgcgcaaaggactgtgagagtccagtggaaggaggattctttgtctaagcggcagagaggggaaatgaccaggagaatgtatctgatttgggccttggaggataagtaggagtttgctggatggaggagagaaacttaggcaaagagaaaagcaataaaaatgcaaggaaagggtgcttggaaagggtggcttgtccagaggctgaagcaggt

SEQ ID NO: 1621 - DNA, 320 bp, Homo sapien
acaccttgttggaggcttcagtgacgacaggcagttgtcacaaaaactcactcatcaacttcttagcgaatttgacaggcaagaagatgacattcacttagtgacattatgtgtgacagaattaaatgaccgggaagaaaacgaaaaccactttccagtaatatatggcattgctgtcaacattaagactgcagagatttacagagcatcctttcaagatcggggtccggaggagcagcttcgtgctgcgcgaactttagcaggaggaccaatgattagcatttatgatgcagagacagaacaacttcgtataggaccgg

SEQ ID NO: 1622 - DNA, 187 bp, Homo sapien
accttaaagcttataatttatttaaaatagtgctattgtgaacgaatgtcatgcttccacatgattcataatagaaattctaatattaaattaatttctctaagagttattacctatagttgaaaggtcataaaaatggaagcgagtaactgcgtgaatacacacacactcttttagtatattttgt

SEQ ID NO: 1623 - DNA, 474 bp, Homo sapien
acaagtcataaacacagtgtgcagcagtgatgatccacaggggcgtgatgacagagcccccgcacaggtggtagccctggaactgaaggctggcctgccagggccactgcgagagcaaggacatgtttccacccacggtgcgtgagctgtagccccttctatgaccacaggctgtgcactgcaaggtaaccacgtggccagaggcacatccctccctcacatatactgagtggtgtaatgcagtcaccttgtcatctggcaagaggtgatcgatggacacaaactcctcccggaactgcccctccagcgagctcactctgaggttatctgaactcacatagcttgggaaacccagttgggcacaggcaacatttgcgtagtgacccttccagtcatcggagcacatggtcttccacgaagcagctgtgaacacctggagcacggcattctgaccacccacccggacacagcggt

SEQ ID NO: 1624 - DNA, 202 bp, Homo sapien
  misc_feature (1)...(202): n = A,T,C or G
acaggtttcactatnacaaatatatgatgttaaactaacaaactcatgaccttcaaagatgtcttcgtcccacgcacacacatttgtaatttgtgtccatttgctatttcccttcttctataatcttcaaattatatagttatgcattgagttccctatgcatctcacccatctcctttatctcagccttctcatactttgc

SEQ ID NO: 1625 - DNA, 337 bp, Homo sapien
acactaccaaggaagctgctgtgtgcagccatcgcacactgggtccccatgaggaaaggaactcagtcggcttaattggctgcggagcatcccaagaaccactgaaaaggcgccactgggctcctctgccagcttcagctacctgctggcaagatggttgtcattcagctaaaagcaagaagagctactcccatcaccagtgtttcccctaacctgtggggaagagcttgctaagacttactcatgctttgtttgtatctgcaggaaggggtcctgagtgaccactgaaagtcacttgccagcctggcttttctagtagccatagtggctgagtcac

SEQ ID NO: 1626 - DNA, 257 bp, Homo sapien; identical to SEQ ID NO: 1118

SEQ ID NO: 1627 - DNA, 256 bp, Homo sapien
atacgaagatggcacattttcacatagctgattttcaaccaaatgaaaaaaatcaagtgcatttcagaagcttttggaagagcagcttaattcctctcagtcgggaaatgttttctctgccttctgctttgcttgcaccaaacatttctaaacacttgttctgccatctacatgggaggtgatgaaactcagtggtaactcatgatttatgacattgaaaataaagaggaacattgacctgcagactatggtttgt

SEQ ID NO: 1628 - DNA, 218 bp, Homo sapien
  misc_feature (1)...(218): n = A,T,C or G
acgaaggcccaancnaaaaaccccgattttagatgtgatatttaggctttcattccagtttgttttgtttttttgtttagataccaatcttttaaattcttgcattttagtaagaaagctatctttttatggatgttagcagtttattgacctaatatttgtaaatggtctgtttgggcaggtaaaattatgtaatgcanngtttggaacaggagaat

SEQ ID NO: 1629 - DNA, 222 bp, Homo sapien
gcggagacggcaaatggcggacttcgacacctacgacgatcgggcctacagcagcttcggcggcggcagagggtcccgcggcagtgctggtggccatggttcccgtagccagaaggagttgcccacagagcccccctacacagcatacgtaggaaatctacctttcaatacggttcagggcgacatagatgctatctttaaggatctcagcataaggagtgt

SEQ ID NO: 1630 - DNA, 224 bp, Homo sapien
  misc_feature (1)...(224): n = A,T,C or G
actatgagaccancttcttcacaggttccacgagtcatgtcaacacagcgtgttgctaacacatcaacacagacaatgggtccacgtcctgcagctgcagccgctgcagctactcctgctgtccgcaccgttccacagtataaatatgctgcaggagttcgcaatcctcagcaacatcttaatgcacagccacaagttacaatgcaacagcctgctgttcatgt

SEQ ID NO: 1631 - DNA, 220 bp, Homo sapien
cgggcgcagacggcggcagtgcggcttgctcttggaagttcaggctcggttgtcttttgggagccatggagagtgacttttatctgcgttactacgtggggcacaagggcaagttcggccacgagttcctggagtttgagtttcgaccggacgggaagttaagatatgccaacaacagcaattacaagaatgatgtcatgatcagaaaagaggcttatgt

SEQ ID NO: 1632 - DNA, 342 bp, Homo sapien
gtgggcttgtgggtctttgagacccgaaaattgagagcgttttcgcactccagcggctgctcctggcggctctgcggccgtcaccatgccacagaatgaatatattgaattacaccgtaaacgctatggataccgtttggattaccatgagaaaaagagaaagaaggaaagtcgagaggctcatgaacgttcaaagaaggcaaagaaaatgattggtctgaaggctaagctttaccataaacagcgtcatgctgagaaaatacaaatgaaaaagactatcaagatgcatgaaaagagaaacaccaaacaaaagaatgatgaaaagacaccacagggagcagt

SEQ ID NO: 1633 - DNA, 528 bp, Homo sapien
  misc_feature (1)...(528): n = A,T,C or G
acaagctttttttttttttttttttttttttttttatcgncggggcattccggataggccganaaagtgttgngggaanaaagttanatttacnccgatgaatatgatagtgaaatggattttggcgtaggtttggtctagggtgtancctganaataggggaaatcagtgaatgaancctcctatgatggcaaatacagctcctattgataggacatagnggaagtgagctacaacgtagtacactcccacnaccacggnatggnctntttcatatggctcaagggtcaactgctcctgnggcttcatgttctcctgntgcatctttttcacttnggaggcaaacacggcctcggntgaggctgtggagtcaatgcagttggccttaatggaaatcacaaagngtcctccattacncangaaggngtgggcnttcagggccacaatccgggtntggtntggctgggccacatcagcaaagatcacatccaccattgcgatgaggcatgcggtntttgtgtgggtgtc

SEQ ID NO: 1634 - DNA, 502 bp, Homo sapien
acctgtttctccctcattcggaaaatttcaaaatttgtgacaacaccctgggtgcctttcggagtcctatctactttcacacacaagtagtctccgttcttctgccaatggagcttgcagtccaccacattgaacaggttcctcactcggatctcttgcctggtagggagctgcatcagggttaccctggctggaatatctttgtcttcaggcacccagaaggcgattatgttaccaccaggagaccaagaaaagtcttttatcccagagatcttcaaactcttcttgtccaaaagacccatagaaggagtttcatagatgctaagcgtatccagggtcattctggcaaagaatttgccatcatggctccacttaaaaataggccaatgggctgagctctcacagtgaaaacccctcttcttgtgccccgtaaggatgtcccagatgattatggcctgagggtcatcctgcgtgtccatcagggggctaaaggtcaccaggt

SEQ ID NO: 1635 - DNA, 590 bp, Homo sapien
gccgactcacacaaggcaggtgggtgaggaaatccagagttgccatggagaaaattccagtgtcagcattcttgctccttgtggccctctcctacactctggccagagataccacagtcaaacctggagccaaaaaggacacaaaggactctcgacccaaactgccccagaccctctccagaggttggggtgaccaactcatctggactcagacatatgaagaagctctatataaatccaagacaagcaacaaacccttgatgattattcatcacttggatgagtgcccacacagtcaagctttaaagaaagtgtttgctgaaaataaagaaatccagaaattggcagagcagtttgtcctccccaatctggtttatgaaacaactgacaaacacctttctcctgatggccagtatgtccccaggattatgtttgttgacccatctctgacagttagagccgatatcactggaagatattcaaatcgtctctatgcttacgaacctgcagatacagctctgttgcttgacaacatgaagaaagctctcaagttgctgaagactgaattgtaaagaaaaaaaatctccaag

SEQ ID NO: 1636 - DNA, 185 bp, Homo sapien
  misc_feature (1)...(185): n = A,T,C or G
actcccgattgaancccccattcgtataataattacatcacaagacgtcttgcactcatgagctgtccccacattaggcttaaaaacagatgcaattcccggacgtctaaaccaaaccactttcaccgctacacgaccgggggtatactacggtcaatgctctgaaatctgtggagcaaaccaca

SEQ ID NO: 1637 - DNA, 194 bp, Homo sapien
gacaaaatccagcatttctttatgattaaaccctcagcaaaattgtcatagagggacataccttaacataataaaagccgtctatgacaaacccacagccaacattatactgaacagagaaaagttgaaaggattcccctgagaactggaacaagagaaggactcccagtttcaccacttctgttgaacatagt

SEQ ID NO: 1638 - DNA, 476 bp, Homo sapien
  misc_feature (1)...(476): n = A,T,C or G
acaaacttacagnnctgtatattccaaataaaggtttttcttcctactatggtatgacaatataactgttttctgaatgaagatacatgttaaggcttaaggtgtaaacactttggaaggcaaacagcttagtgaaaaaaattatggttcatttaaaaatgtgtatcatttcataatagacccctgaactttcaaatttacatgtgagaatacatttacatcttaactttctaggaaaggcacaggctttatgtaaaaaagcagcaaagttttaaacccaccaatatattgacaaagccattacttttattagaaacaaataatgcttctcaaggtgttggcaacatgtcatagtatcaacatatacttcatacagtgtatttctccctttaattatattccggnaggaggtggaatacctccttggctatgaggggcagatgtatttgatggactgtgtaggctggtctccttgt

SEQ ID NO: 1639 - DNA, 139 bp, Homo sapien
aatcaatcgatcgatcgcgaaataccctttgtaagaaaacacacacacccactcacacacgcacgcgggaaaatgcaagacgagggtgactggaggcccagcagggttcgcgccgccgccgtctcctgctcgcagcact

SEQ ID NO: 1640 - DNA, 232 bp, Homo sapien
  misc_feature (1)...(232): n = A,T,C or G
acttgattgannntcagagaaatatcacaaattagaaatattaaatctaaggatgaaaggtatatataaaacaatttgggggccaggcacgatggctcaaacctgtaatcccagcactttgggagaccaaggcgggtggatcacttgaggtcaggagttcaagaccagcctgggcaacatggcgaaaccctgtctctactaaaaatacaaaaattagccgggtgtggtggca

SEQ ID NO: 1641 - DNA, 326 bp, Homo sapien
gcgagctccggaggaatttcagtatctgctacggtaacttcatcagcccgccaagatggcgatgcaagcggccaagagggcgaacattcgacttccacctgaagtaaatcggatattgtatataagaaatttgccatacaaaatcacagctgaagaaatgtatgatatatttgggaaatatggacctattcgtcaaatcagagtggggaacacacctgaaactagaggaacagcttatgtggtctatgaggacatctttgatgccaagaatgcatgtgatcacctatcgggattcaatgtttgtaacagataccttgtggttttgt

SEQ ID NO: 1642 - DNA, 303 bp, Homo sapien
actgctttgtgtgcctgctgaggaagaacccgttgtaatctttgtagtagtgcttgtgctggaaagcaggcttttctgaagcccagctgcagaggtaactgttggtgttgatgtggtgcttggaacactagaactaatcaaatcatcttgtcttctaccaaaggagcaacttttatgatacgttgatccttcattaactgagctattttttttaagatcatcttcccattttctccttgtatatgaactacttgttcgcaaacttgaagaatctctgttttctttctcttcaatgtcagatgt

SEQ ID NO: 1643 - DNA, 324 bp, Homo sapien
accgcctccttcccagccgcgcggcttcctccagacctctcggcgcgggtgagccctattcccagaggcaggtggtgctgaccctgtaacccaaaggaggaaacagctggctaagctcatcattgttactggtgggcaccatgtccttgaagcttcaggcaagcaatgtaaccaacaagaatgaccccaagtccatcaactctcgagtcttcattggaaacctcaacacagctctggtgaagaaatcagatgtggagaccatcttctctaagtatggccgtgtggccggctgttctgtgcacaagggctatgcctttgttcagt

SEQ ID NO: 1644 - DNA, 323 bp, Homo sapien
acgtcatacaaaggaatatcattcagtaataaaaagaaattagctatcaagccatggaaagacttgaggaatcttaaaaggatattactaagtgaaagaagccactctgaaaagaccgcacactagatgattctaactacatgacattctggaaaaggcaaaaatgtggacacagaaaaagattagtgattgcctggtgttcagggagaggggaaaatgaaagaggtgacgcaaaggggatttttagggcactaaaactattctacatgatacagtaacaatgaatatatgccaccataccttcgtcaaaacccgcagaatgt

SEQ ID NO: 1645 - DNA, 480 bp, Homo sapien
acggcgcacaatggaaaggagccagaagccaaaacagaagcataaccgttggtcgtggggaggctctctccatgggagccctagcatccacagtgcagatccagacaggcggtcagtttccaccatgaatctttcgaaatatgttgatcccgtcattagcaagcggctctcctcttcatctgcaactttactaaattctccagatagagctcgccgcctgcagctcagcccatgggagagcagcgttgttaacagactcctgacgcccacacattcgttcctggccagaagtaaaagcacagctgccttgtctggagaagcagcatcttgcagccccatcatcatgccctacaaagctgcacactctagaaattcgatggatcgaccaaaactctttgtaacaccacctgagggctcttctcgcaggaggaccattcatggcacagcgagctataaaaaagaaagagagagagaaaatgt

SEQ ID NO: 1646 - DNA, 215 bp, Homo sapien
actattggtcagataatgttgttacactgaaaaaattcaccacatacaaagacaaatgcttgcccctagcacattcacagcttcaactgctacagactgtcactgaaaaaaatgcattggtcagtctgaaccatgtcaagtaaactatggaagtagcaaatccacaacacaaactgtgctagcactttcttttcaagtctaactccaaaataggt

SEQ ID NO: 1647 - DNA, 351 bp, Homo sapien
  misc_feature (1)...(351): n = A,T,C or G
acagctattatttgccatggaaaaggttagtctcatttagaaaaatcgaaagtgcacagcacttaaagggaatatatgaggttttttttttaaaaaaaaaacttttatttattatttgtagtatattgtctgaaatgtgttggcagttttttttcttttaatgtgtcaaatcttgaaatattaaatgtatacattttnngctatgttttgggaacaaatctgtttgatttatatagttttatattgaattttttttgccctgattgtttagggtgataggtcttaagcagcatatatctatatatctgnntgtgggtatatagagatatatgtgtgtgtgtatgtatatgt

SEQ ID NO: 1648 - DNA, 504 bp, Homo sapien
  misc_feature (1)...(504): n = A,T,C or G
acattcaggacaaatgattagccctaaatgaaactgtaataatttcagtggaaactcaatctgtttttacctttaaacagtgaattttacatgaatgaatgggttcttcacttttttttttagtatgagaaaattatacagtgcttaattttcagagattctttccatatgttactaaaaaatgttttgttcagcctaacatactgagtttttttaactttctaaattattgaatttccatcatgcattcatccaaaattaaggcagactgtttggattcttccagtggccagatgagctaaattaaatcacaaaagcagatgcttttgtatgatctccaaattgccaactttaaggaaatattctcttgaaattgtctttaaagatcttttgcagctttgcagatacccagactgaggctggaactggaatttnncttcctattgactctacttctttaaaagcggctgcccattacattcctcagctgtccttgcanttagg

SEQ ID NO: 1649 - DNA, 577 bp, Homo sapien
acaattccttgcttctttatgcaacctaacaaaataatatagaatgaagtcattagaaaaatatgaacctttctgaatctacattacatttttaatttaaattggaaaatacagtttagatcatatgaaacatatggatttcagacatgtattatctgtttctaacagattattacaggcggtctttattttggctgaaatgcaaaaatatgactttcttaataacagattagttaaaaatactttccattgatagcagtgctagtccctagaacaaaaggtaagcaaaacttatttgtaagttactgcctattcaatgcccagaatatgtagatcctaaatctaagcccttaatatacatctactttaaagataactgaaagatctcacatgcctgataatccttaatttaaaccgtcctgtaaacatagtcaaaatctgctaatagaaatacaattcaagtaaacattgcatatttgatttaaaccaccttacagttaaattcactcatgacacattggatcataaccactaatatgtaaaaagttttaaaaaaatcatccttacgtatagatga

SEQ ID NO: 1650 - DNA, 234 bp, Homo sapien
actactgattattaagcaggacagactgagctttctgttgcaaataccttggaggagaaagtaatttctaaatatacagagaggtaacttgactatatatgttgcatcctgtgcctcccttcatattaatatttgataaagattttaatttatgtaaaacttctaaagcagaatcaaagctcctcttggggaaatggcaagtctttaggataggcaagaccctgtatgaatagt

SEQ ID NO: 1651 - DNA, 296 bp, Homo sapien
accaaaggcaaaacattatacttaaaattaaattacagatgcatgaagaataaaagtttaatgtatcaaagataatttgttatttaatgcactcaatgtcagtatttggggcaatttttaaagttttcccaaaaaatggcatgaatagctctatacaataataggtaagaacaggaaaatgaaaacacctttataccatattttcacaaaccattctaaagacagcaaacttgagctcagctgcttttccttgctttaaaataagctaccagtaattctaaatcagactaaaatgt

SEQ ID NO: 1652 - DNA, 452 bp, Homo sapien
  misc_feature (1)...(452): n = A,T,C or G
accttcattgcgatcaaaccagatggggtccagcggggtcttgtgggagagattatcaagcgttttgagcagaaaggattccgccttgttggtctgaaattcatgcaagcttccgaagatcttctcaaggaacactacgttgacctgaaggaccgtccattctttgccggcctggtgaaatacatgcactcagggccggtagttgccatggtctgggaggggctgaatgtggtgaagacgggccgagtcatgctcggggagaccaaccctgcagactccaagcctgggaccatccgtggagacttctgcatacaagttggcaggaacattatacatggcagtgattctgtggagagtacagagaaggagatcggcttgtggtttcaccctgaggaactggtaggattacacgagctgngctcagaactggatctatgaatgacaggagggca

SEQ ID NO: 1653 - DNA, 284 bp, Homo sapien
gatctttatgtagaaggacttcctgaaggaattccttttagaaggccatctacttacggaattcctcgcctggagaggatattacttgcaaaggaaaggattcgttttgtgattaagaaacatgagcttctgaattcaacacgtgaagatttacagcttgataagccagcttcaggagtaaaggaagaatggtatgccagaatcactaaattaagaaagatggtggatcagcttttctgcaaaaaatttgcggaagccttggggagcactgaagccaaggctgt

SEQ ID NO: 1654 - DNA, 602 bp, Homo sapien
  misc_feature (1)...(602): n = A,T,C or G
acagaacatcgtcagcactagcacagtttacagaacctcacagacccaaaggaacatcaataggcaaagcgactacaggaggcgtgtgtccgcgtgggcgaggtaaagagggtcagtattggtcaagtgccagtgtcggtaatctggcaagacagtgatgttaagaaggttcatagtttaagaattatctaaaatattttaaaaactataaagctgcaacacatgatttttacacctagttactagaaaactaaggaaagcacttattagctctgaataaagtaacatggaaagcacttttactaatcgacaaaaaaaccttctaatgcattatcagaaagattttataatacaaggaggcatattgctcagtcagaaggggttctataagaaaagcacttactaagttagcgactaacagaacaaccagtttaaagatgaattaaatgcccaatttggggaggcatggcaggtgtaagagaaaggaaaagcttaagaaaacatttcctgataataccaacctttctttcatcatctactgcatttgacagaaattaaccttttagagnttttacccntgacactttcattccttgtacctg

SEQ ID NO: 1655 - DNA, 197 bp, Homo sapien
actggccttgggcctcctatgatgcagacatggtgaatttaattcaaggaggaggagaatgttttaggcaggtggttatatgtgggaagataattttattcatggatccaaatgtttgttgagtcctttctttgtgctaaggttcttgcggtgaaccagaattataacagtgagctcatctgactgttttaggatgt

SEQ ID NO: 1656 - DNA, 173 bp, Homo sapien
  misc_feature (1)...(173): n = A,T,C or G
gtccaaatactcaactgccactcggccttcagtagagcttaatacataaccctgcttgtttggaaacgctcgtatgcancgagtctggtatttcaggctggactccctgcgctgctgcacgtaacccatgttccgtaagtcccacaccaacactctgcggnctgctgttccca

SEQ ID NO: 1657 - DNA, 435 bp, Homo sapien
accaccagatacttaaagcttcaaaaagactgcccctaccaccacaggaggaccagcctaaccatacgctccaaaagatggctgtgatagatcttgtgaagcaattactgagcagatcaagatctttgggaaggaacactaaagatgttttgaatgaattatagtccactggcattttagtgtatttttttttctttttagaaacacacatttctaaaaatgtcatgttacattcctgcatgtcccttttgatagcattagtggatccattggatttcttttttctttttgtgagacagcttttagtcttacctgaatttatgtgtgtttttccgacagtggttaataattatattggtgatgtagcagcaattgtgttggcagggttttcatatattattagtaattaacactaactgttggactgacttgtgt

SEQ ID NO: 1658 - DNA, 128 bp, Homo sapien
  misc_feature (1)...(128): n = A,T,C or G
ttttttttnnnttttttttttttatgggttctgcatctcgtttattagcacanaaataacaggtttanagtatattacaaaaagagctcaaactgttcaaatacagcaactgggcttactaggggaca

SEQ ID NO: 1659 - DNA, 296 bp, Homo sapien
  misc_feature (1)...(296): n = A,T,C or G
acagttaaaaatganagcccaatacagggtattataaggaacaaggtataaaagagaggcaggcgcttgattacaaatgagtaagtgacatacggataccagcaacagctgtcggttctgtttcctttgctccctgttgcactcacaatctcccattctccattatcaaaaaaatctctcttgtctacatcttggtcctctagaattatatcaacctgtgatccatcataagtccaagaaccaaatttcatggaacagttctgaaggtcaaatgggaaaaacgtgacatctatggt

SEQ ID NO: 1660 - DNA, 581 bp, Homo sapien
  misc_feature (1)...(581): n = A,T,C or G
actttactgcacccagcagactttcaacaactcattgatccaaagatacatgcacagtctgagcaccagctatggtgctcataacttctttaagacttgaaccctttcaatctgtgtgattcattaaattggaccattgatgatgagaatacacattgtatgtttctgtgcacatgacagtgtgtgtgtgtgcacgtacatactgtatagtcttaaaaatagcattatactggccaggggtggtggctaacgcctgtaatcccagcactttgggaggccgaggcgggtggatcaactgtggtcaggagtttgagatcagccaggccaacctggtgaaaccccgtctctactaaaaatacaaaaattagctgggcgtgatggtgggcgcctgtaatcccagctacttgggaggctgaggcangagaatcacttgaacccgggaggcggaggttgcagtgagccgagatcgcaccattgcactccagtctgggcaacagagtgagattccgtctcaaaaaaaaaaagaaaaggaaaaaatagcattatacctcttncttgnctcaaccgccatgaaaattctg

SEQ ID NO: 1661 - DNA, 118 bp, Homo sapien
actgctatttattgataacatctttcgcttcacccaggctggttcagaggtgtctgcattattgggccgaatcccttctgctgtgggctatcagcctaccctggccactgacatgggt

SEQ ID NO: 1662 - DNA, 249 bp, Homo sapien
acattaagaagagatccaaattacaagagaggcagataaaatttgaattctttaagcattcattaaacgaagttttggagtaacatccacgtttatcttcctttcactaatcacgttccctgttaagcacatcataacaacagcacagtgaagtgaatgatgaaataagagcattttgatacactagaaaacagtgctcagtgagacatttacattctatttatatgattaaacatttgatcatacagt

SEQ ID NO: 1663 - DNA, 545 bp, Homo sapien
  misc_feature (1)...(545): n = A,T,C or G
actgtctgatttactacacagagaaactttttttttttaagatatatgactaaaatggacaattgtttacaaggcttaactaatttatttgcttttttaaacttgaacttttcgtataatagatacgttctttggattatgattttaagaaattattaatttatgaaatgataggtaaggagaagctggattatctcctgttgagagcaagagattcgttttgacatagagtgaatgcattttcccctctcctcctccctgctaccattatattttggggttatgttttgcttctttaagatagaaatcccagttctctaatttggttttcttctttgggaaaccaaacatacaaatgaatcagtatcaattagggcctggggtagagagacagaaacttgagagaagagaagttagtgattccctctctttctagtttggtaggaatcaccctgaagacctagtcctcaatttaaattgtgtgggnttttaattttcctagaatgaagtgactgaaacaatgagaaagaatacagcacaaccct

SEQ ID NO: 1664 - DNA, 529 bp, Homo sapien
  misc_feature (1)...(529): n = A,T,C or G
acaatctcctgtttctttgccatagtggctttgatttgggattatatgcacccctttccagagtccaaacccgttttggctttgtgtgtcatatcctattttgtgatgatggggattctgaccatttatacctcatataaggagaagagcatctttctcgtggcccacaggaaagatcctacaggaatggatcctgatgatatttggcagctgtcctccagtcttaaaaggtttgatgacaaatacaccttgaagctgaccttcatcagtgggagaacaaagcagcagcgggaagccgagttcacaaagtccattgctaagttttttgaccacagtgggacactggtcatggatgcatatgagcctgaaatatccaggctccatgacantcttgccatagaaagaaaaataaagtagccaattctaaaagtagccctctttctcctggatcttgctgaattantggcttggggggtgggggagataaaaagaacttaaaaatgggtnaagtaagaaatgttaaaaaagt

SEQ ID NO: 1665 - DNA, 372 bp, Homo sapien
accagcagtgcccaaaatctttaagccataagctctagcaatttggcatgctgttaatccaactcctccacttgccccatgaaccagaacactctctccagctttcacacaggcactgtggatcagagctcgataagcagtaaaatatggaatgccgatggcagctccttgtttaaagtccagtttttcaggtagtttgtaaacagtgtggtctgctgcaagagcatactctgcataacccccagagatcgtgctgctagtgaaaactctgtcacctttcttgaaagcagatgcattatctccaacagcttctatcaccccagccacatctgagccaggagtatagggtaagagtggttttctactataagt

SEQ ID NO: 1666 - DNA, 194 bp, Homo sapien
acagagtggcatcaaggtgcggctacagctctaccgaacagccaagatgggctggggggtccgcgccctgcagaccatcccacaggggaccttcatctgcgagtatgtcggggagctgatctctgatgctgaggctgatgtgagagaggatgattcttacctcttcgacttagacaacaaggatggagaggtgt

SEQ ID NO: 1667 - DNA, 295 bp, Homo sapien
atttttcacttgttgccccaaatgtgaaagcatttcattcctttaagaggcctaactcattcaccctgacagagttcacaaaaagcccacttaagagtatacattgctattatgggagaccacccagacatctgactaatggctctgtgcccacactccaagacctgtgccttttagagaagctcacaatgatttaaggactgtttgaaacttccaattatgtctataatttatattcttttgtttacatgatgaaactttttgttgttgcttgtttgtatataatacaatgtgt

SEQ ID NO: 1668 - DNA, 525 bp, Homo sapien
acagaatactttcccatttagagggtgttcttcctgagtaatttagcctctatttcaggatccaggcacggcagatgatccccgcacatgaaatcataagtgcaaccagtgatggttacttttcctctctaaatgaggcagccacccctgccaaatggacgggtctccctgtgctctaaggctgctgctggtattgcccttccgtggctgtgtagaaatcatccaggacgctctgtaagtagtcaaacgttggtctctcttctgccttttctttccagcacattttcataatgtcatagagctcatctgggcagttctccacacggggcatcctgtagccctgggacagggcggtcatcacgtcggcattagttctccctgggtagggaattttcccataggtgacaatttcgtataggaggattccaaaggaccacacatcagacttaatagtgaaacatccaaagttgattgcttctggagccgtccacttaatagggaacttagcaccttcccttgctgtgt

SEQ ID NO: 1669 - DNA, 476 bp, Homo sapien; identical to SEQ ID NO: 482

SEQ ID NO: 1670 - DNA, 389 bp, Homo sapien
  misc_feature (1)...(389): n = A,T,C or G
actgatgtcaaccccagtgtttcctcatttactgagcatgtgtgactttcaaaaggctctgttactctcttgatttctgtgaggagcgagatagccatgactttaccctgaccatgtgactggaaacatactgaatattattggatggagaagttcacagtgtttcacaaacacatgacaagttattgttaacattatatgaatgggaggtggcaggtcaagtaaggccagagaagcattcaagctgacaccttgttcatgaatttaatctcttatgagnaacagctagaatgatcacagtggccagtttggtagcctgatcattttggtncatatgcagaaatgttctcaaatggactttgagagttagnaattagttggtatacagg

SEQ ID NO: 1671 - DNA, 315 bp, Homo sapien
acccctttattgctcaaagaaagcaagccacaaacaataatgaagcaaaaaatggaatctaagaatctttttgtatggaatattacttctatcagaagatgatcaagatgtttcagtccagtgcacatcagcattgctgacattttatggattctaaacttgtgttgtttctttttaaatcaactttttaaaaaaataaagtgtaaattaaccgactagagtacaagcagactctgaagatgatcagacaaggcaaagcgaaattggtcattctcgctaacaactgcccagctttgaggaaatctgaaatagagt

SEQ ID NO: 1672 - DNA, 128 bp, Homo sapien
  misc_feature (1)...(128): n = A,T,C or G
acactgaatgatgnagcnnctgctctggttctcatgacggcagatgcagcgaagaggctcaatgttacaccactggcaagaatagtagcatttgctgacgctgctgtanaacctattgattttccaat

SEQ ID NO: 1673 - DNA, 530 bp, Homo sapien
  misc_feature (1)...(530): n = A,T,C or G
acttttagtanagatggggtttcaccatgttggccagactggtctcaaacttgtgaccttgagtgatccacctgcctcggcctcccaaagtgctgggattacaggcaagagccactatgcctggacctttattttatgtaatagatgttttatgatgtgaaaataggttgatatcttaaaaataggttttcctttctattccaattttgatatgaatgcatttctttgtattgtttttttctcaaataaatgaatcaagaaaccaagacaattggtccaatttgacgtttttcatttgatttaaaaaatgcagaaattaatatactgagtcccttttaagacagaggcctgctcgttaatgtaaaagcttggaaaagttatacaaagaacactccgaaaaataaagtttttgttattaacacaaatgattttgtaagaagcaaaacattttttttcaaaagcaggatttgttctaantctangttcacaaaggtattcatttctanaaatatcaacttaagactgtgaga

SEQ ID NO: 1674 - DNA, 551 bp, Homo sapien
  misc_feature (1)...(551): n = A,T,C or G
acatgatacagattggttttgcagtttttaatgaactgaaatagaaatgtctaaatacagcagtatctgcctgtgcaacaaatatctgtaaggtaaaataaggtatttgatagaagaacatctgcaagaacaaatcagatgaaaaatctgaaaaggtttctatataccttctggattttaaaaaaacccaaaaattaatggctcaagatactacattgctaaagttaggggaaaaaagtaaaaaggctgtgagttctgttgcaagagctcatttgtagacttgcaaaatctaactaattttatattatgcttgttgttagagcagtgctcaaaattacagaagcttcaaattgttatgttttcacaaaatttgctacatatgttgacatgaatgtgtgtcagggaattcatacccaggtaaatgacaattacatcagtatagctaatttttgccaccttgggaggaatggaattctgcctattttcgaattaatcctacagcactcactaaaaaactaacagccatggcnccataatacattttgtgaggt

SEQ ID NO: 1675 - DNA, 279 bp, Homo sapien
accattggtggccaattgatttgatggtaagggagggatcgttgacctcgtctgttatgtaaaggatgcgtagggatgggagggcgatgaggactaggatgatggcgggcaggatagttcagacggtttctatttcctgagcgtctgagatgttagtattagttagttttgttgtgagtgttaggaaaagggcatacaggactaggaagcagataaggaaaatgattatgagggcgtgatcatgaaaggtgataagctcttctatgataggggaagtag

SEQ ID NO: 1676 - DNA, 383 bp, Homo sapien
actgggaaaatccagctgggatgtgacacagcttaactgatagcttaaggcatcagtattgggaccaaaggctggtcagatttgtatcattctgaggaccaaatgatgggaacaataaaattgttcatgacagttgttctcattttgctgtccagatgaagactcttaagatgacagaaggtgatttttctggtgatcgaggacttccggggtaatgacagtgatgaaatgcaggggacctggtaggtttcttttggagactaactgggggctgcctggtgggacagaacagcatgtttccaagggctgtggctggtcatagccatgggatctccaactgcatgcaagagcaacctggaaagactttgacagcgcaggtcagt

SEQ ID NO: 1677 - DNA, 312 bp, Homo sapien
  misc_feature (1)...(312): n = A,T,C or G
acggtagaactgctattattcatcctatgtgggtaattgaggagtatgctaagattttgcgtagctgggtttggtttaatccacctcaactgcctgctatgatggataagattgagagagtgaggagaaggcttacgtttagtgagggagagatttggtatatgattganatgggggctagtttttgtcatgtgagaagaagcaggccggatgtcagaggggtgccttgggtaacctctgggactcanaagtgaaagggggcntattcctaggttttattgctatagcccattatgattattaatgatgagt

SEQ ID NO: 1678 - DNA, 234 bp, Homo sapien
cttcagaagaggctcgcctctagtgtcctccgctgtggcaagaagaaggtctggttagaccccaatgagaccaatgaaatcaccaatgccaactcccgtcagcagatccggaagctcatcaaagatgggctgatcatccgcaagcctgtgacggtccattcccgggctcgatgccggaaaaacaccttggcccgccggaagggcaggcacatgggcataggtaagcggaagggt

SEQ ID NO: 1679 - DNA, 101 bp, Homo sapien
accagaaactacctctgaaggctacactttccaagttcaggatggggctcctgggacctttaacttttagatcatgtagctgagacataaatttgttgtgt

SEQ ID NO: 1680 - DNA, 316 bp, Homo sapien
  misc_feature (1)...(316): n = A,T,C or G
ttttgaaatataaacngagaggctttctgttgagacattgtcaccaaaacaattttttgaaatgttcctgaaactaatttgggtttaaagattaaaagggttgttaccattcttatctgagtagttgggaggaggggactaccactttagttcatttggaaaatatagacatatttcttttgctttcttaaaacagcttaaaatgatgaacttttataattttaatttgaagattgaataaatattttttataaagattgttttgagtgctgatttgtttactttttgtagatttgctttatccatgatattcagt

SEQ ID NO: 1681 - DNA, 610 bp, Homo sapien
  misc_feature (1)...(610): n = A,T,C or G
acatacaagagacatattctttgacgtataaaaaatacagaaatatttacatgtatacaaaaatattaaaacagatttcagaaataaggaaaacaagcaagtttttacaaaggatactttcttgggaaatacacacaatgaaaaaaagctttagaaaggtgacaacacatttaatagactccagaagttgatatttctgttggtatcaattgagtaagaggaacataaaatgtctgaaatgctaacagatggaaaaccagacatatttaagactgtntaggtaaaattgcatgggtttcctttaccataaaattgaatcaatttttttttaccctcagtatcactatctacttttnctttttncttaaaatatttaaattgtttgatttgtattgagaattttaaactttttctcattaaaattgnaaaaatattttaaagaggntggctatcctctttatnttctggggggaaaaaaacctcaggatactacaccgatttcaacataaaattgaaaatnacaatncaattttttttaaagttaaaacctaacatttttctaactaaacattnatgatcagtaacaaattgatttaataagagatcacaa

SEQ ID NO: 1682 - DNA, 243 bp, Homo sapien
  misc_feature (1)...(243): n = A,T,C or G
actattttaatttnnattgaagaagttcagaaatttaaaagcagagcattttttatgatatcattgttggtgttaattgaaagtataatttgctggaacacaaagaccaaaatgaaagttttttcctccctgcttaaaaatgtagcagcttcttagttactttggaacactactcttacatgtataaagtgattgacttgactttctagcttcccttgtccggaggatattaaaatgctaggg

SEQ ID NO: 1683 - DNA, 304 bp, Homo sapien
  misc_feature (1)...(304): n = A,T,C or G
aaatgccgctggagataaaccataaaatttgtgacactaacgtggcatggggtgaatcacataagctgctagctgttgaacaccagtgtttcaagatacaacttttataaacgttttatttgttttgcttataccatcagaactgaaactactgtccgtgatttccctgaaacagggaaatcaatctaaaacacatactggtgcctttcaaaagatangcaattgaaaagggtggtagcangcaggcatttggtatcttttncttttaaaaaaaagctttcaagctgaaggaaaaacatgtgac

SEQ ID NO: 1684 - DNA, 456 bp, Homo sapien
  misc_feature (1)...(456): n = A,T,C or G
caaacacaaaangcaagatgaaataaactgtttttttttctccagaaatctctactccagtgcccacagcacacaagagtcaaaacaaataagcaactaagatcccccgatcacaaatttccaaagaactggaggaggggaagaaacagggtgaaaatggtggtatgaaagggaatggatgttagcagcactgcttcaataactgatctattctggatgaaatacccttttttatgtgcagtaaattctgaacaaggctaaattttaggatattccttgaactgaaattagaaaataccctgacaatggaagcagctctttcatctaagtttaataagagcctctttctccatgggccactgttgtgaacanaagccttttctggcatcaaaagctgtcacagtagcccttccatctctttcatgaaagcctcatagacatcatccttaggtttgt

SEQ ID NO: 1685 - DNA, 279 bp, Homo sapien
  misc_feature (1)...(279): n = A,T,C or G
aaacaganacaacttttcattggtggagaagcttgtctatggggagaatatgtggatgcaactaacctcactccaagattatggcctcgggcaagtgctgttggtgagagactctggagttccaaagatgtcagagatatggatgacgcctatgacagactgacaaggcaccgctgcaggatggtcgaacgtggaatagctgcacaacctctttatgctggatattgtaaccatgagaacatgtaaaaaatggaggggaaaaaggccacagcaatctgt

SEQ ID NO: 1686 - DNA, 572 bp, Homo sapien
acaagaaacacatgactcttttcatatcaatgggagggacttttctacaaagtattttccaggatgcaacccacatttaaacaatgtaaaattctttgtttcctgcaacaacttacaaaataaggtaaaagactaaaattcaagatttgcttccttcattgtcctaagacgattcgttgagaatcactgactttgagatatttaaaactttaagcattatactgtggtttcttttgcactgcactcacctattcaggactcctcccccaggttcttcatcatgcacaaaaatgcaaagaaaacatcttattagtaattaatgaagcaacattgaaattctaactctagctgtctttggattctaattaactcagcatcaatttctcacctcagactacagtgaatttttatttcctatcagctgaaatatttcacagatggaagctcatgtttcagttttaatgactgccttgaataaacaagttgttgccacttgtttcaaacaaaagcctaaaaataatctacattcaattttaggctccattgactaatatggtgttgcttttggaagt

SEQ ID NO: 1687 - DNA, 179 bp, Homo sapien
  misc_feature (1)...(179): n = A,T,C or G
acaatcttaaaacctgtagttctcaattatagtaatatttcttacttccagtaatatgtctcaataccttggactgctggatgtcaaaagacaatacctgggggccatctatgagatctgaacaaatagaggaattctctannactgtatactctctattttggctttttgaatgaagt

SEQ ID NO: 1688 - DNA, 440 bp, Homo sapien
accctgaccgcacagatggtcatagctgaacgagcctgaaggctggcaagttcattcctacctgacaggagatggctaaggctcaaagaaggtgatccaggcgagtgcagacctgggctggggcccagcatggagggcagcctggcccactatggcccactttgctatcctagggccccagggaaaggtatacttctttccacccaggaaagcctggccccaggacagctggctggctgggggaaggaggaagaagaccctcttgctccagaaatggccaacacagcaaatgcccaaacaactctttggttcagactagcaagcaaaggctgagagaggatcaatgtcttgcctgaagtcacacagcaatttagtggaggagccagaatggaacacagggctcttgacacccaatcttgggcaaaggactcagaggaggt

SEQ ID NO: 1689 - DNA, 347 bp, Homo sapien
  misc_feature (1)...(347): n = A,T,C or G
actaatgatggcaaataatccatttatattttacaaaataaaacanntcantaatatatggctcatcctacctctgtggcaatacaaaatgccatttcaaattttttttaaaaagattgtgtgaatacttcgggtgagaataaaatataaaatactatctatataaagaataaacacataaaatacagtgtatgccttttaaaagtttggacagacgtatcttcatagagagatgcaaacaatgaaagtgtagttataggtccaaacttagccaaaatatgacagttttaatataatagtttgtttgaaaaaaagtagtcagacttcatccaaaccacccttgcggt

SEQ ID NO: 1690 - DNA, 315 bp, Homo sapien
acatgaagtttctatttgattatgtggttttatatcacattcgttcaaatgcatttctctcccttagagggactattccaacatcactcctttggaattatttcagtcatccttaacatgtgactttaccaaagaccttgaagctaaacaaacaagcaaaacaaaatttcaatgactcttagatgaatggaataagaaatagtcatcacatgtcaattagggatgttcatctccaaccaagacactgtcaaaatgtttcttctgatacagcagttataagtcagagccttcaaaaaacaagggcagaacaagagt

SEQ ID NO: 1691 - DNA, 351 bp, Homo sapien
accctagtaacaagtcatatcacgatcaataaatgatcacagcctttcgaaaaaactactgagattggagaatgggtttctgtctccaacccctgaaagacgttgctgcttcaagacctacagctccaagaagacaactcagaatttcttacttttaaaaaaatattgtcatgaataactgaataattagatttctaggaaaatgaggcttttaaattaagatttagcaaaatcaactataatgtatttacttctactcattgatgaatgacagaaatcagttaaagttttacatacaaaagatataaatactgcataatacgtagtgaatattggcacaaaccctttcgt

SEQ ID NO: 1692 - DNA, 373 bp, Homo sapien
  misc_feature (1)...(373): n = A,T,C or G
accaactcttgtcaggctcagtggcagcttctacgacctgatggatggaaaaaaatcaaactctgtgactctatggttgactgccacctctgcaaccttgactcatctgctgaaaaggcaagaagaagaaagggcagcaagccctgttttagggactacataagatgaggggagataagggggacatagatgagttctttaggattgcgtgtgttttgagtttttgtttctaactgaagaaatctgtcaatattaaatagggtgggaaaatggtttcttagaataactgttcaactgtgtgtaaataaggaaagttttcaatgagtattacttattgtaattaatgcagaaggacttncccagtcaaaaaaaa

SEQ ID NO: 1693 - DNA, 537 bp, Homo sapien
acttacacgtaagattttagcctatggtcattttataaagatgactgttaggatttaattcacatttaaagaaaatgagattcgttatattatggtgttttttatgacctataaaatacttacccctacaaatttccataaatgtagtggttagtaaagcttttttcttactgaaaaataatgccaggtaaccaagtattattccttccatcatttatttaggaaaaagttttatgtattagggtaaagtggtagaagttaacctagaatctaataatctccaatcacccattcctgatctaatagtagccatgagaaaaaatctctagaaagaatcatacctctcaaaaaataaaaaataaaacaaaggctgggtgcagtggctcacacctgtaatctcagcacttccggaagttgaggtgggcagatcgcttgagcctaggcatatcgcttgcagcctgggcaacgtggcgaagccgtctctaccaaaaaatacaaaaagtagccgggcatagtgacatacacctgagcccagga

SEQ ID NO: 1694 - DNA, 566 bp, Homo sapien
actcgtttccacaccaagactcagactttttgagccaaaaaaaagccacattcttacactgtccagcttgtaatggttaatgtaaaacttaccagatgaaccttgtgtttcagcttttttcttttccccttccccttgcttcagaggcctgatggcgtcggactattccgaagaagtggccacctccgaaaaattccccttctagaacatgtagacacttgagaaatgtttctgtttgaagaaaatagagggagaaacagaagtcttaagtctgtggcacactgtgtcttcagacagtttgaaggaatgaaaacctagagattttaaatcatgaattgaacatgtaaaattccagtaaaatgtaaaaacggaatatgcatcgctcttaaccttgagcatagtgacttagagacactgtgtatcagttttgccaataagactgtggacttcatgattgttgttgaacttctgggtcaaaactcaaatgaggtgaattttgcctttaaagggtttatttgctgagaaccaactttcaaatagtcatgagagaatcaaataatagatgt

SEQ ID NO: 1695 - DNA, 223 bp, Homo sapien
acccctttattgctcaaagaaagcaagccacaaacaataatgaagcaaaaaatggaatctaagaatctttttgtatggaatattacttctatcagaagatgatcaagatgtttcagtccagtgcacatcagcattgctgacattttatggattctaaacttgtgttgtttcttttttaaatcaactttttaaaaaaataaagagtaaattaaccgactagagt

SEQ ID NO: 1696 - DNA, 332 bp, Homo sapien; identical to SEQ ID NO: 875

SEQ ID NO: 1697 - DNA, 414 bp, Homo sapien
  misc_feature (1)...(414): n = A,T,C or G
acttgttgttgctttgtttggagggtgtggtggtctccactcccgccttgacggggctgctatctgccttccaggccactgtcacggctcccgggtagaagtcacttatgagacacaccagtgtggccttgttggcttgaagctcctcagaggagggcgggaacagagtgaccgagggggcagccttgggctgacctaggacggtcagtttggtccctncgccgaataccacatgattaccactactgtcccgggagagacagtaatagtcagcctcatcttccgcctgagccccagtgatggtcaaggaagctgtgtttcctgagctggagccagagaatcggtctgggatccctgagggccggatgttaccatanatgacaactacaggggcctgtcctggcttctgctggt

SEQ ID NO: 1698 - DNA, 408 bp, Homo sapien
actaccacagactgttgacttttagtttcttaaagagaaaaattgcctttttactagaaagcctttgtatattgcaatttttctgtttgggaaaatctaaggatttactgtggttagtcttacagaagaaatgtggatttgataaactagtgcctatgattttaacttatgtttgatatatagtagtaagggttttatgaatgttgattattttgtgccaacagcccagaattgtcacttatatgtaagcagaaaacaatgagctctgcttccaaagttatttaattttctcagtgtttgaatgttattttttgtaagtgtgttaataaaagtgtaaagaattggaaaaaatataaatattcttaactcaagcatttgctggatcatttttctacaaaacttgtttgt

SEQ ID NO: 1699 - DNA, 96 bp, Homo sapien
acctgacagtgtaaagaaggagctcctacaaagaataagaacattccttgctcagcatgccagcctttaagattgaattagattgtgttgttgtgg

SEQ ID NO: 1700 - DNA, 257 bp, Homo sapien; identical to SEQ ID NO: 1118

SEQ ID NO: 1701 - DNA, 271 bp, Homo sapien
actgccggagttgaggattactgtgccagtaaatttggagttgtgggttttcatgaatccctgagccatgaactaaaggctgctgaaaaggatggaattaaaacaaccttggtttgcccttatcttgtagacactggcatgttcagaggctgccgaatcaggaaagaaattgagccttttctgccacctctgaagcctgattactgtgtgaagcaggccatgaaggccatcctcactgaccagcccatgatctgcactccccgcctcatgt

SEQ ID NO: 1702 - DNA, 492 bp, Homo sapien
  misc_feature (1)...(492): n = A,T,C or G
cttacactgttgctgctgcctctacgttcaatggcttccagaggccgacgatctactatgtgatgtcagggcctgcgtggcaactcatgcagcaattccagaaccccgacttcccacccgaagtagaggaacaggatgccagcaccctgcctgtgtcttgtgcctgggagagtgggatgaaacgccacagagcagcctgtgcttcggctagtattaatgtgtagatagcactctggtagctgttaactgcaagtttagcttgaattaagggatttggggggaccatgtaacttaattactgctagttttgaaatgtctttgtaagagtagggtcgccatgatgcagccatatggaagactangatatgggtcacacttatctgtgttcctatggaaactatttgaatatttgntttatatggattttattcactcttcagacacgctactcaanagtgcccctcanctgctgaacaagcatttgtagcttgt

SEQ ID NO: 1703 - DNA, 355 bp, Homo sapien
accatttaagtcagtttcttatttgagtatgaggtgtctatacatttctataatttaagattttggtaacgcttcatatcaaatgagttgtagatctacttaacgtatgacttctcctttcaaagaaggaaggaaggctgacaagggagggagaagggatacctgctaatgatgatgtgctagaaagacgactcattacatgcttatcattgctggaaggacttcttccctccactgagccgtgggatgtcataagagcccttcgaagagctctttttggagttttggagaaagagaatgctcttgtaaccttttttgaagtcttttttattgctcttgatgctctactcaatgt

SEQ ID NO: 1704 - DNA, 350 bp, Homo sapien
gcaaagacaaagaaacaaactacattggcatttaagccaatcaaaaaaggaaagaagagaaatccctggtctgattcagaatcagataggagcagtgacgaaagtaattttgatgtccctccacgagaaacagagccacggagagcagcaacaaaaacaaaattcacaatggatttggattcagatgaagatttctcagattttgatgaaaaaactgatgatgaagattttgtcccatcagatgctagtccacctaagaccaaaacttccccaaaacttagtaacaaagaactgaaaccacagaaaagtgtcgtgtcagaccttgaagctgatgatgttaagggcagtgt

SEQ ID NO: 1705 - DNA, 484 bp, Homo sapien
cacagcgcctgcttcctcggccctgaaatcatgcccctaggtctcctgtggctgggcctagccctgttgggggctctgcatgcccaggcccaggactccacctcagacctgatcccagccccacctctgagcaaggtccctctgcagcagaacttccaggacaaccaattccaggggaagtggtatgtggtaggcctggcagggaatgcaattctcagagaagacaaagacccgcaaaagatgtatgccaccatctatgagctgaaagaagacaagagctacaatgtcacctccgtcctgtttaggaaaaagaagtgtgactactggatcaggacttttgttccaggttgccagcccggcgagttcacgctgggcaacattaagagttaccctggattaacgagttacctcgtccgagtggtgagcaccaactacaaccagcatgctatggtgttcttcaagaaagtttctcaaaacagggagt

SEQ ID NO: 1706 - DNA, 281 bp, Homo sapien
accttcctgtttctcgcgccccggcttttaaaaactccccagctctggtccactactccaccgagatttctcaaaaagtcgccctcggagagtgatcccggggggtgctttgcgaagagggtgcagaaaatgaacggaggagcagctggcttgagggctgggaacactcgcgtgtgtgagagatttaggatgagtttgggaagaaagtgggggcccgaggattctagagagagcacagcccgggctgaggaggggaaagcgcggtggtccggaaatttgag

SEQ ID NO: 1707 - DNA, 332 bp, Homo sapien
acagcattctggaataaagcaagagtgttcattcacacacacagtagcttcaaaactgttcgatctgtttgttcccatgtagttttctaaagatggaaaaaaaaggactttggtcatcaagactactgtggccatattagattactggaacatctaagcatcagtgtgtgaccatgcgaacaaaagacttcggggagtgtctatttttaaaaaggtttatgtgtgtcgaggcagttgtaaaagatttactgcagaatcaagcccacttttaggcttaggaccaggttctaactatctaaaaatattgactgataacaaaaagtgttctaaat

SEQ ID NO: 1708 - DNA, 237 bp, Homo sapien
gtaaactgtagttaaagtgtccccactcgagaaaacaggaggcacaatcgaaagtgctttttacacacgtgtgcgcgcacacgcacaactaaaaacgtgattctgatttgttggaaattcttccaacaggaagaatcactgtaagttgttactactaaattaacttggttttatttattttcttttctagccaatactgatgcaagaaaatatttcaattctcaacctgattaatgt

SEQ ID NO: 1709 - DNA, 379 bp, Homo sapien
acaaagccctaagcatgagtggaaaatcgttgcttcagaaaagacttcaagtaagtatatgacacttgccagattgttttcagcttacctatttttaagaaggagtgttgccaatttaatacctcttaaattgactactcgaggaaaaaactcagaagcaattaaatttggaaaacgagagcagattgttccagtctgggatgtggagactggagtccaattcaggatcatatacacaaaccaaaagtaataattacatcttaaacatggaactcttgtgcttacagataacacttacttgtgcctggctgtgctggatggtatattctgtgtcatttttcttcatgggagaaacagcccacagagctcaccaacaagt

SEQ ID NO: 1710 - DNA, 306 bp, Homo sapien
acagattatgtgtaacagaacaatggctttttatgatttttttttaacattttaagcagactgctaaactgttctctgtataagttatggtatgcatgagctgtgtaaattttgtgaatatgtattatattaaaaccaggcaacttggaatccctaaattctgtaaaaagacaattcatctcattgtgagtggaagtagttatctggaataaaaaaagaagatacctattgaaaaatgtaagttttatttacagatcaggccacaggttacaaaattaaaaccaacagcagttttgaattatctgt

SEQ ID NO: 1711 - DNA, 210 bp, Homo sapien
  misc_feature (1)...(210): n = A,T,C or G
accccaaaattctgcatagattatttagtataatggtaagttaaaaaatgttaaaggaagattttattannaatctgaatgtttattcattatattgttacaatttaacattaacatttatttgtggtatttgtgatttggttaatctgtataaaaattgtaagtagaaaggtttatatttcatcttaattcttttgatgttgtaaacgt

SEQ ID NO: 1712 - DNA, 585 bp, Homo sapien
  misc_feature (1)...(585): n = A,T,C or G
actcctagaagaaataacaaatttgtcatcccaggtggaagaaaactggacccatttgcaatcactcttcaatcaaagcatgtgtattttaaattatctcaaaagtgctttgttgtaaaaataaatttgtgactaaacaaagactttcatattaaatgggttcaattgaactcatttcttattttccaagtgtcaatgtgaaaagaaaataaatgctagcactactgactagtcagtatatctccactttaaatgctaaatactttcttgaaataaaatcgcacctcccggccaggcatgatggataatgcctgtaattccagcactttcagaggccaaagcgggaggattgcttgaagccaggaatttgagcccagcctgggcaacatagcaagcaagatcccatctctacaaaaagttaaaaaaataaattacacctgcctttngttttgaagacttaaagaatctgctcaaatgatttattttctgagtctcttcacattaacttttatatgatttttaaaaaaattattacctgcttatatttttttgagtatctgtttcatataaagagatgctgcatgt

SEQ ID NO: 1713 - DNA, 366 bp, Homo sapien
acagcttctcaaatcatgttagaagggtctcacattcaatgatcaagaaattttaaaatagcagtaattattttcattttaagaaaaggttccctttctcccctcccaccccaagtatttaacatgaaagaatgggcttccttacatattaattttatacttatttttgaagcagcaacaattaaccatcaatttggcatttctgtttacagtcgctacaaaaattttttaaatttcacaaagccattatccagtgttgccatgaaacagagactgtaaattctaggtagctaagattctttctgaaaccaatgttaagtcaaagaaatataaagcagggcattacactaagtttctggatctagt

SEQ ID NO: 1714 - DNA, 126 bp, Homo sapien
gaactgatagttactgttgtgacctgaagttcaccattaaaagggattacccaagcaaaatcatggaatggttataaaagtgattgttggcacatcctatgcaatatatctaaattgaataatggt

SEQ ID NO: 1715 - DNA, 586 bp, Homo sapien
acacggaataaaagtcctactctctagaacatgagaagtcaataaatagaaaagatatacaaagtggaatgaacataaaaatgactaagcatgtgatcttcacattcatacagtttttcaactaatcttttacaattaaaaagtcatttatttgaaactgtagagttgatatatgccatattagtttggaaccttacaaaacaactttagtggtgttatttatgtgtggagagaaaactgtgtatgtaactatcatgtttcaagggacatgacttaacagtgaagttttttatgttatagggaagaaaacaagtattagtatcagttatcttagaaatgctatctaaactagaatgacatttgttcagtatgatatgttctttccctaactccattctaattgcttaaaaactatcaagtgaagttacaaaagttaaaccactaaatgtggcatcttttcttacacaaagtatcttctcttagaaatgcggtatttaattaagtaaaccttcttggtgaccccagttataatcaaaagaggccacgaaactacagactactgacgaaaagtgtcagtggagacact

SEQ ID NO: 1716 - DNA, 432 bp, Homo sapien
acacgtctaccctctgcctcagcagatgcgagttgccttctcagcagccagaacctctaatctggcccctggaactttagaccaacctattgtgtttgatcttcttctgaacaacttaggagaaacttttgatcttcagcttggtagatttaattgcccagtgaatggcacttacgttttcatttttcacatgctaaagctggcagtgaatgtgccactgtatgtcaacctcatgaagaatgaagaggtcttggtatcagcctatgccaatgatggtgctccagaccatgaaactgctagcaatcatgcaattcttcagctcttccagggagaccagatatggttacgtctgcacaggggagcaatttatggaagtagctggaaatattctacgttttcaggctatcttctttatcaagattgaaagtcagt

SEQ ID NO: 1717 - DNA, 533 bp, Homo sapien
  misc_feature (1)...(533): n = A,T,C or G
acagtggccctcagattctcagcttgattctaaggaactttcagctggttctcaatttgtaggactcatggcagttctcacagcatgtttttcaagtggctttgctggggtttactttgagaaaatcttaaaagaaacaaaacaatcagtgtggataagaaatattcagcttgtgtctttttccttggagccatccttgtaataacagctacttttttgtatggttatgatcccaaacctgcaggaaatcccactaaagcatagttgtatactatctttaactggtttttcacgatggggcactaggaatctcgacattaatcttgcacagaggacttctacagagtctgagaagatatcatcatgctgaatctgatcatactgttttttaaaagtttaaggataagatatgtgtatatgtaacaaaacacattgcatctagaaatcaaaacttgaaagtatttccagggattaggattagaangaatattagaggaaacttgaaatctgagtttaaaaagatttttaccttt

SEQ ID NO: 1718 - DNA, 586 bp, Homo sapien
actaggttttctcttacctttgtaatttagaatttattggcagaaattacacacacacacatatatatatataactaaaaaaggtaaatttcagcaaacaaatgcaaacctgtagggtaaatggatttttaaaaaaaattcagtttatcaaatttcatcttctctgccattttagattggcaactattggttatttagaaaatttagactgctgaaagttcatttcttgctccttgaatatgtttaatttctacaaggcttccagttgtgcccgtagcttccttgaggtcattttccactttctcctctgtcactagatatcgtgcgtaagatatttatccttgatttggaaaagcctaaataaaaagcttccgttttgaccttttaatttataaaactccactaggaaatccatttaatttttatgcatgtccacaaaaatattttctttcttaggaatcaaacacttttattggaataaagatccttcaaagtttttaactcttctattagagttttattttgattttccaggactgcaactcggttttccaggcatttcacatattctttcttctttcacctg

SEQ ID NO: 1719 - DNA, 349 bp, Homo sapien
acggagcaatcgaggaggcataaccacacttggggtggctatagggctggaaaacgctgaagatgactgctttcactgaggtcaaggattgtaatattgccagctttgtaaagtcattaaagcagaagtttcttcagtgatcttctctctaagaaacaccatcacccccatgtgccttacagaggccccctgcgttctgctgcattgcttttgcgcactcccttgatgatgaagatggtcccaataatgatgcccaccagacccacagtcaggcccagggcacacaccacgttctctgtagtctctgggagagggcttggagcatcaaactcccagtgcttgggaagag

SEQ ID NO: 1720 - DNA, 437 bp, Homo sapien
acataagagccaccttgtaggctaagagtttaacgttgtttaaacacagcgtttgaggcaaacagtagcaacagcagcagcaaatgcaccaaactgacgaaaaggcccagatattttcctcactcatagtcagactgttgtgtctcaccccttacataacatccaagtgagatttctcacagtgctaccttggcaacaaactaaaaatatctagacaaggtcttggtttaagccttattaaaaagctttctttgtgattatctggtatctggtttggtctccagaaaatacatagacttggagataggaaggcctcacaggacttcattctatatctttacagcatttgcaatcaaaactggccagttaaatgctttcgttcacttttgaattttaacagaatataggatatatcagtttggacttgttttttgttg

SEQ ID NO: 1721 - DNA, 436 bp, Homo sapien
acaaatatgaaaataaatctttatctttaacctcaattttatcttcagcaggagggttgtgcaacttgggtttatgcagatcacatcaagtgttaaataatcaaatgtcacatatgtcatataaagcagcaagtgaaaaaaataaattatgaaaatgcatgggctaaaagttaacagtgaaaaatatctccttatccaacattattttccacaatgaaattaaaatattttacaatgtatcaggatacatttaaaaaaggactgtagtataactatgattttaaaatatcttaaagaaaaacagggacaaggtgaataacttccatagtaatatgcaaatgtatcaagttaagtctaagataaaaacattaaatatttttgttcttactgaaaatgtgctttaaatttgagaacaccttcatgaaatcaaaacgtt

SEQ ID NO: 1722 - DNA, 488 bp, Homo sapien
  misc_feature (1)...(488): n = A,T,C or G
acagatactctactacactcagcctcttatgtgccaagtttttctttaagcaatgagaaattgctcatgttcttcatcttctcaaatcatcagaggccgaagaaaaacactttggctgtgtctataacttgacacagtcaatagaatgaagaaaattagagtagttatgtgattatttcagctcttgacctgtcccctctggctgcctctgagtctgaatctcccaaagagagaaaccaatttctaagaggactggattgcagaagactcggggacaacatttgatccaagatcttaaatgttatattgataaccatgctcagcaatgagctattagattcattttgggaaatctccataatttcaatttgtaaactttgttaagacctgtctacattgntatatgtgtgtgacttgagtaatgttatcaacgtttttgtaaatatttactatgtttttctattaggctaaattnccaacaattttgt

SEQ ID NO: 1723 - DNA, 473 bp, Homo sapien
  misc_feature (1)...(473): n = A,T,C or G
cttttttttttttttttttttcatgggggcagacatgtttatttgaaggatggaaaactacattgaagttattttaaaaaatatataagttttactgctgacagaanactgaaagctagtctgaggggaggtggaacagcatgagggaaggtggaacaacacgtgtctaagtgctgcgttaanagggagcctcttgtatgtttggaattgtgagttcctcagtgtgattgcagcctcaagtagactaggaagtaagccagttaggttgganaggtgggcaggggtcaagtgaaatgganaactgtgggctaagcaaaggagtgtgttttttntccancaggcagnggggaccttanacatttgtaagcaagtgagaggcacattcanatttgtggtgtgaggaaaagcgatgccctaanatgcanactcatgccttcanattccagctgctggtaagcaaganacaggcncca

SEQ ID NO: 1724 - DNA, 572 bp, Homo sapien
acttagcagtgaaatatttataggcaacagattttaagaagtcagttccatggctattaaaaaatgtttaagttaatgaaatttacagtgcatattaaaagcatgatacaaatggaaatttaaaattttgtattaggaagcccagtttgctaaaagtagcattaatatcattcacatcagattttaatttgttacacatttttgtagttcagcaaaggcccctatgatgaaaaacaattaaaaagtgttatgacaaaaataattatctgtgtaaaaagggggagacccaaaagatttttcatatggttatttaattcagttaaatagaactgttatgaatttgagaggaatgaagatattcaaacactaacagaaaatcattagccttatattagagcattcaaatgcttatgtaactcttcaatccatctggcttcataaaaaccaaaattttgaacacaaaaaagtggcagagtttacattaccttttgtatgttcctaagtatgaaattgcatcaatttattatgaattaaatttgaaaagcatcacagatttaaaaacaaagtacctc

SEQ ID NO: 1725 - DNA, 254 bp, Homo sapien
accttttaatgtgtcaaatttcaaaaaacccatcacaggaaaaaatactgatctgttggatcctttaaaatacagataaatcattttatgttttttttaaaaaaatctgcattaagatattaacaactggctacaattcattacctaataatttaggtaagactgttatttatttttaaaaatccttttagttgggtgaaatccaagaagacttcattcaactaaatgcacttggtgctgctctcaactgttgt

SEQ ID NO: 1726 - DNA, 219 bp, Homo sapien
ctcaaatactgtgaactatctctaaaacactagaaaaaagaaatgttagtatctcaattacaccaactgtgcaaatgaactttgataaaatagaaataatctacattggcctttgtgaaatctggggaagagctttaggattctagtagatggatactgaatactcaggcccacttaaattattaatgtatacattgtgtttttgtctttatgctatgt

SEQ ID NO: 1727 - DNA, 470 bp, Homo sapien
actagcactatgatgtctcccagaaggaggctggtcgtgtgtccacctcatcatcagcgttatcttctgatgacaacagagaaggatatggagcgacacattttacgttcacataagtagcgttcacatggacatagtgctccccaatgaaagtagagaagattgctgatatccgggacaccagttcagaaaaggatgggcgcatttcggctttagggtgccagcattttagcattacttcatataaggggtctgggcagtattcgggttgtaggagtcttctcccttgcaacaagtaaacagttatatcaaaggtgtttacatcaggataaggtggggctcctcttgtcatcagctcccagaggagcacgccaaaggaccacacatctgacttggtggtaaacttttgagtttgcagactttccaaagccatccacttcactggcagctttgcacctgttttgttgtgt

SEQ ID NO: 1728 - DNA, 388 bp, Homo sapien
acatctcatttttgcagaaaagtaggcaggcagaaagaattatacataaaagtttccaaaaggaaaaacaaagaaatatttaatctgatctcttttcttttaaaaaattaattcagtagacttctattttttcctgtgtaacatgggaattcctggctctaaaatggatgaattttcagtgtcagtgtaaagacatcttgttactttctttaaaataaaaactgcagcgtggaaattaatggtgtattacgcatttaaactccagataggcaggaactggaaccaagtgttaagcaatttgcttaattattgacttttcgtaagaaaagtctaggggaagggggagaacagagttgcttttagcctctctctcaagagtttctgctgt

SEQ ID NO: 1729 - DNA, 154 bp, Homo sapien
actctttaacaactctgcttccttggacgggaattcatgaggtataatacttaaggagattttcatctgtaggttttaggattttcttatcggccatattcaccacccatcctggagcaagaccaaagaaaatctgccttggatccttcctagt

SEQ ID NO: 1730 - DNA, 206 bp, Homo sapien
  misc_feature (1)...(206): n = A,T,C or G
tttttttttttttttttttttttttttaaaanaaataatgnggtagtatttatttagggagagacagatgtgttgccatgttacttagtcatactanagagccagccaagtttgaataatgaaggtgcanacgtgttgtcttnttcactgacaagctgtctgaacaaggagccaggaactgtcgggtcaccanctgtggagtgtgc

SEQ ID NO: 1731 - DNA, 427 bp, Homo sapien
acttgtaagtgttttggctggaatattctgctataggagaagacggacgtttcgtggagactactttgccaagaactacattccaccatcagatatgcaaaaagaatcacaaatagatgttcttcaacaagatgagcttgattcttacccagacagtgtaaaaaaagaaaacaaaaatccagtgaacaatctaatacgtaaagactatttagaagagcctgaaaaaactcagtggaacaatgtagaaaatctcaataggtttgaaagaccaatggattattatgaagatctaaaaatgggaatgaagtttgtcagtgatgaacattatgatgaaaacgaagatgacttagtttcacatgtagatggttccgtaatttccaggagggagtggtatgtttagcaaccactgaatgtgacttaactatgt

SEQ ID NO: 1732 - DNA, 555 bp, Homo sapien
  misc_feature (1)...(555): n = A,T,C or G
accacattttcttcatccagctttgtgatactaaagaggccagttacttactacacattcaccaaaaatacagtggcaaaacaggaataatgtctctagacattcctgttgaaaaaaatgggaaaatgcacagactaaaagaatgattggtccaccacattttaaaatcccagtggtaaatgttgcaagtcatttgattatattcaacgcctgtgaataattattcatgcctctcatctctgacctctaggctcttcgttctgccttttgagttattcttttttttttttccatgaaatacagctggtaccataaattttttcaatcttagtgtaaaatctgtatctcattgtaggcttctggtcaatacctatacataacaacttaatgtgatctaaccaactcaactgatanaaagctgaattgttcccagtggacaagtggtatttgatgtttagcaggtttttttgttgttatttttttggtaaactctgtggtaaaatctaaaataatgttaaaaccctaaaagtaactattgaatattctgtaatctta

SEQ ID NO: 1733 - DNA, 321 bp, Homo sapien; identical to SEQ ID NO: 1095

SEQ ID NO: 1734 - DNA, 354 bp, Homo sapien
accattctggctgagcagtggaacttgtctaggatggtatcgacaatgcaacattattccttatagcaaagatgttgacctaggaatttttatacaagattacaaatctgatattattttagcatttcaggatgcaggacttccgctaaaacacaaatttgggaaggtagaagacagcttggaactatccttccagggaaaagatgatgtaaaacttgatgtttttttcttctatgaagaaactgatcacatgtggaatggaggcactcaggccaaaacaggaaaaaaattcaaatacctgtttccgaagtttacactgtgctggactgagtttgtagacatgaaggtccatgt

SEQ ID NO: 1735 - DNA, 374 bp, Homo sapien
accttagagttcctggccagagttgactctaggtagtgatgtgattttcttgggatgtttttctaaatattcttttatgctaaagcacatggcttgatacttctgttgattaagctcgtgtctacttacagtcatctagtgagaacctgtggtgtggtgagatgataacttggtctttggtcttcatcatttgaactagttttggttttgtcttgtcccttccttgagcattttgtgtgtgtctaatcctatttggtaaacgaaccactgtgaaagaccaagttggagaaaacagaacacccccaaaacatttattttttttttagaaaatcatggctcactatggtagtatacaatattgttttcacacatgt

SEQ ID NO: 1736 - DNA, 197 bp, Homo sapien
  misc_feature (1)...(197): n = A,T,C or G
gttttaggactttaatgttctttacatattcaacatanaatactgacaatagataaacaataggggaaagacttttcagcaaagtatcactctcgtagtcatacattacaaagaaaacagtagagaacaaaggatagggtaatttaacagaaatgtttagtttaatggcataattgaaaaacaaccaaccaatcaac

SEQ ID NO: 1737 - DNA, 541 bp, Homo sapien
atctgtgatccagcaagaagggagttccagtcaagagtcactacaactgattagttgtttagagaatgagaaatggaacagtgaggaatggaggccatatttccatgacttcccttgtaaacagaagcaacagaagggacaagaggctggcctctacatcactctcaccttccaaatcttgtggaagtgcatctacttgccagaaccaaattaacttacttccaagttctggctgcttgcaggtggaactccagctgcaagggagttagggaaatgaaggtctttttttaaaagcttctcagccttcctagggaacagacattgggtgagccaatctgcaatttctactacaggcattgagaccagttagattattgaaatattatagagagttatgaacacttaaattatgatagtggtatgacattggatagaacatgggatactttagaagtagaattgacagggcatattagttgatgaaatggagtcatttgagtctcttaatagccatgtatcataattaccaagtgaagctggt

SEQ ID NO: 1738 - DNA, 576 bp, Homo sapien
acttcttcgatcttcaccttttgtgctgtgattcttcagtttctaaaccagcactgtctgggtccctacaatgtatcaggaagagctgagaatggtaaggagactcttctaagtcttcatctcagagaccctgagttcccactcagacccactcagccaaatctcatggaagaccaaggagggcagcactgtttttgttttttgttttttgttttttttttttgacactgtccaaaggttttccatcctgtcctggaatcagagttggaagctgaggagcttcagcctcttttatggtttaatggccacctgttctctcctgtgaaaggctttgcaaagtcacattaagtttgcatgacctgttatccctggggccctatttcatagaggctggccctattagtgatttccaaaaacaatatggaagtgccttttgatgtcttacaataagagaagaagccaatggaaatgaaagagattggcaaaggggaaggatgatgccatgtagatcctgtttgacatttttatggctgtatttgtaaacttaaacacaccagttgtctgttcttgatgcag

SEQ ID NO: 1739 - DNA, 368 bp, Homo sapien
  misc_feature (1)...(368): n = A,T,C or G
acaaaaaaaagcacattcctagaaaaaggtattggcaaatagtaaaaatgggaggtcaaaagcaaaaaaaaaaaaaaaaaacaaaacaaaaaaaagaaaaaaccaacaattcttcaattcagtgtgcaaacattatataaaaatagaaatactaactctacaagcagtatttcctgataaattatttaaatagcatatctacacaatctgagatatctattccaatggcaatgagaaaataatttataaaaataaagcaatggtataccagatgatagaaaaaaaacataactttcagaaattgtatttaacatttcaatgctatttccttattgggaatacttctctgcanagtttttatgctatgt

SEQ ID NO: 1740 - DNA, 553 bp, Homo sapien
  misc_feature (1)...(553): n = A,T,C or G
acatactatgttcatgatagtgtgatttttttcacatttaagcaggaatgcaatataaaaatgtgaatctcttaattctcaggcatgtgcttattatatttctttttagattgtctatctgtataacacacacacacacacctaagagtctctatttcacaattatatttttgtaaatagtatatgcatttttaatacattggaggctttattttgaactaatttcttagagaatagttatattttctattacacaagtttaaaaatattattaacttgtattttcttaatatacaatctatcttttccacaaatatgagtgggaaataaatcagcacatttgaaagaaagtgttaaaactgaaggcctcacttaattagaaacgtgataaatatatggacaaatggactatacatactataagaggactgtagtttaatactttttacccaaatatgtttaaaaacttcgtgcatttgttacagctcatgttttctatatgaacttagtcattaatgttctttataaaaagtgaaataagatggnaaaataa

SEQ ID NO: 1741 - DNA, 190 bp, Homo sapien
  misc_feature (1)...(190): n = A,T,C or G
actgacttcatnaaagccatctcagagccattgatacaagtcaatcttactatatgtaacttcagacaaagtggaactaagcctgctccagtgtttcctcatcattgattattgggctagctgtggatagcttgcattaattgtatattttggattctgtttgtgttgaattttttaatcattgtgcaca

SEQ ID NO: 1742 - DNA, 269 bp, Homo sapien
ggcctttccacttggtgatcagcactgagcacagaggactcaccatggaattggggctgagctgggttttccttgttgctattttagaaggtgtccagtgtgaggtgcagttggtggaatctgggggaggcttggtccagcctggggggtccctgagactttcctgtgtaacgtctggattcacatttactgatcattggatgagttgggtccgccaggctccagggaaggggctggagtgggtctcaggtattagtggtagtggtggt

SEQ ID NO: 1743 - DNA, 301 bp, Homo sapien
acaaacagtatttctggtgtatattttaatgtttttaaaaagagtaatttcatttaaatatctgttattcaaatttgatgatgttaaatgtaatataatgtattttctttttattttgcactctgtaattgcactttttaagtttgaagagccattttggtaaacggtttttattaaagatgctatggaacataaagttgtattgcatgcaatttaaagtaacttatttgactatgaatattatcggattactgaattgtatcaatttgtttgtgttcaatatcagctttgataattgtgt

SEQ ID NO: 1744 - DNA, 169 bp, Homo sapien
acggaaagaacttaataagatattagaagggagaagcaaaatttctgtcaatgacttcatcataaaagcttcagctttggcatgtttaaaagttcccgaagcaaattcttcttggatggacacagttataagacaaaatcatgttgttgatgtcagtgttgcggtcagt

SEQ ID NO: 1745 - DNA, 266 bp, Homo sapien
acatggcatttttctgtttatttctcaaagaatttgggtcaacttgtgggaaagtttagaaaatttcacttcagcctcagtagcttgacatctttttagtagtttgaagtgcttaaaatggtgaaaatttctctcgctgtttctttaatgtagtatttttcttaagaaaccgttttttccagaatgaagataaatttcagcttagatcatgcatgaagaaactcgttttaaattggaagagtttatgctaatgatatttatgctgc

SEQ ID NO: 1746 - DNA, 135 bp, Homo sapien
acttatagtgactctactgtttgaaatactatttttttaaatcaagttttataaaagtgtagaattttggcttttttaagttatgttgttagcacacaggacacttccttgttgtcttttgtggaaagggcaagt

SEQ ID NO: 1747 - DNA, 482 bp, Homo sapien
acccagcggaggtgcagtgtttaaaaaggatgatattggacgaaggaatgggcaagctccaaatgagaagatgaagcaagtgttaaagaagactatagaagaagccaaagcaataatatctaagaaacaagtggaagccggtgtctgtgttaccatggagatggtgaaagatgccttggaccagcttcgaggcgcggtgatgattgtttaccccatggggttgccaccgtatgatctcatccgcatggagtttgaaaataaggaagacttgtcgggaacacaggcagggctcaacgtcattaaagaggcagaggcgcagctgtggtgggcagccaaggagctgagaagaacgaagaagctttcagactacgtggggaagaatgaaaaaaccaaaattatcgccaagattcagcaaaggggacagggagctccagcccgagagcctattattagcagtgaggagcagaagcagctgatgctgt

SEQ ID NO: 1748 - DNA, 486 bp, Homo sapien
acagatactctactacactcagcctcttatgtgccaagtttttctttaagcaatgagaaattgctcatgttcttcatcttctcaaatcatcagaggccgaagaaaaacactttggctgtgtctataacttgacacagtcaatagaatgaagaaaattagagtagttatgtgattatttcagctcttgacctgtcccctctggctgcctctgagtctgaatctcccaaagagagaaaccaatttctaagaggactggattgtagaagactcggggacaacatttgatccaagatcttaaatgttatattgataaccatgctcagcaatgagctattagattcattttgggaaatctccataatttcaatttgtaaactttgttaagacctgtctacattgttatatgtgtgtgacttgagtaatgttatcaacgtttttgtaaatatttactatgtttttctattagctaaattccaacaattttgt

SEQ ID NO: 1749 - DNA, 339 bp, Homo sapien
gagaaaaagatctaaagatcttttattttcatcttttttggttttcttggcatgactaagaagcttaaatgttgataaaatatgactagttttgaatttacaccaagaacttctcaataaaagaaaatcatgaatgctccacaatttcaacataccacaagagaagttaatttcttaacattgtgttctatgattatttgtaagaccttcaccaagttctgatatcttttaaagacatagttcaaaattgcttttgaaaatctgtattcttgaaaatatccttgttgtgtattaggtttttaaataccagctaaaggattacctcactgagtcatcagt

SEQ ID NO: 1750 - DNA, 259 bp, Homo sapien
acctacttcagatgaacgaggcgcaagacaaaatccaggacttgcctatggaaacccatattctggtatccaagaaagttcttcccccagcccgctctccatcaagaaatgccctatctgcaaagcaaatgatatttgcgatcacaccttggagcaacagcagatgcagcccctttgtttcaattgtccaatttgtgacaagatcttcccagctaccagagaagcagatctttgaagaccacgtgttctgccactctct

SEQ ID NO: 1751 - DNA, 257 bp, Homo sapien; identical to SEQ ID NO: 1267

SEQ ID NO: 1752 - DNA, 76 bp, Homo sapien; identical to SEQ ID NO: 1488

SEQ ID NO: 1753 - DNA, 359 bp, Homo sapien
acaacatttaaaatactatatttagtaatccagaagctactgggcacctccttcatctaccatgactgcattgcaaaactccaaatcggaacagcctcttgctataaaaaccgtgctaacgtgtcagggaagtccccgagtaattcagaagctagaatccatttgtgcccacaagcagtgttggtcttcccaaaataggccctcaagaatgccactttcctcttacagcctcgctgcctaaactgactgttggcataacctgagaatttgggggcaatcagcaaagtggggaataggcaggacatttttctaaatgtattgatttgtttatttggatgtttatcaatagataccgaagt

SEQ ID NO: 1754 - DNA, 594 bp, Homo sapien
  misc_feature (1)...(594): n = A,T,C or G
acccaaatgtgtttgggattggggactgcaccaaccttcctacgtcaaagactgctgctgcagtagctgcccagtcaggaatacttgataggacaatttctgtaattatgaagaatcaaacaccaacaaagaagtatgatggctacacatcatgtccactggtgaccggctacaaccgtgtgattcttgctgagtttgactacaaagcagagccgntagaaaccttcccctttgatcaaagcaaagagcgcctttccatgtatctcatgaaagctgacctgatgcctttcctgtattggaatatgatgctaaggggttactggggaggaccagcgtttctgcgcaagttgtttcatctaggtatgagttaaggatggctcagcacttgctcatcttggatggcttctgggccaaaactgcagtcactgaatgaccaagagcagcacgaaggacttggaacctatccttgtaaagagttccttgatgggtaatggttgaccaaatgcctcccttttcagtacctgccccgggcggccgcccgggcaggtacaataaataattatttaaaagtcatagctccagtcactactgaaa

SEQ ID NO: 1755 - DNA, 352 bp, Homo sapien
acaatacagaaaatacaggtcagttctggaccaaaataattgcattaaaatacaaaaggtgatagggaagaattaaaagatttgcagtgactgcttttggtggtcagctacaacaagccaacaaccctcagctattttggaaagtgaaggtgagtcttaatttgcagataatgaatgtcttcggtagtttaaaaaaaatataaactctaaaaaagctcgtgaatcatatacaaaagcagctatttgagaccaaggttgaacaccagaaattgtgttagcaccaccagcaagcacagggtcctctgactcttccgccctcctatcttgtgcagaatgcagacttgaatgttgt

SEQ ID NO: 1756 - DNA, 159 bp, Homo sapien
ctcgcccagctcgcccagcgtccgccgcgcctcggccaaggcttcaacggaccacaccaaaatgccatctcaaatggaacacgccatggaaaccatgatgtttacatttcacaaattcgctggggataaaggctacttaacaaaggaggacctgagagt

SEQ ID NO: 1757 - DNA, 255 bp, Homo sapien
acagaaatagtaattagcaatgttctgctgaaggagaaagatgtttatctgaaaaagctggttaactattaaataacacattttcttttgaatttttaaaggaagtataataaaattgaccaataaacttttcacgaccataagcttctatataaaaaatttgatttaggtttatcttaatattctaaaaaagtatttgcactctaaaataggtctgggagttaaaatcatgtaggctgtttttcagtcttgtgt

SEQ ID NO: 1758 - DNA, 581 bp, Homo sapien
acaggcattggcacattttaaaaacaaactacataaacagatctttcctataacctaggaaagtggaatgtcagaagtcaacaaaatgtgataaacttaaagtgctaaaacagaaggcacttcacaaaatctgttcactgaaacagttatatatcctcgtttacatccttcactttacaagtggcagtgaacgtctgtttggatagaaggacatacagaaatacaggcagtttagtggcagtaaaaatataagacaagtaatgagtccttggccaacttgtttttgatgacctgtagtgtcctttaactttcctccttaagaagaaaaaacagaaggattcacaattagaagaaaagttgaaatccagaatatagttacttttgggagtggggacgtttgtggatattaaatcacttatcccctaaagcaatcagagccctttgtttttatggttgaagttttgtgaagtaaagaaagtattagggaagaacacttcagaatcagtgaactaaaaaaggtgttacattcattattttaaatatttaggttattaagaagtctaaaatgttacacagttaga

SEQ ID NO: 1759 - DNA, 147 bp, Homo sapien
actacgtgccagctctagttttcagccttgggaggttttattctgacttcctctgattttggcatgtggagacactcctataaggagagttcaagcctgtgggagtagaaaaatctcattcccagagtcagaggagaagagacatgt

SEQ ID NO: 1760 - DNA, 477 bp, Homo sapien
acattgaaaaaaggaaagacatttcttcataccaacctttccctagttcgcagtttctgaatagtagaaacaaaacacatttttaaatctttctatcaatttaatttaggacgaagtaacacaacttttataattaaccactgaagttgtctttaaggacaaaacttaaattttaaaatgggtgttaccatattttatgagtggactgactccaaggttgccttgctccaagtctgggcatcgtgacattgccgtgatgcccagaagaaagttaatggcaatgatgtccagtcagagggcagacatgctacacatcacaatgatgagagctgcggattctgccctcttcaactccaagtagaaaattattattttcattcaaactaactggaagtgagccaaacagttaaaaagtcagaatgaagaataaaacaattttcttttcacatagaggagggacactccttcagccccgtc

SEQ ID NO: 1761 - DNA, 345 bp, Homo sapien
acacttgaaaccaaatttctaaaacttgtttttcttaaaaaatagttgttgtaacattaaaccataacctaatcagtgtgttcactatgcttccacactagccagtcttctcacacttcttctggtttcaagtctcaaggcctgacagacagaagggcttggagattttttttctttacaattcagtcttcagcaacttgagagctttcttcatgttgtcaagcaacagagctgtatctgcaggttcgtaagcatagagacgatttgaatatcttccagtgatatcggctctaactgtcagagatgggtcaacaaacataatcctggggacatactggccatcag

SEQ ID NO: 1762 - DNA, 219 bp, Homo sapien
  misc_feature (1)...(219): n = A,T,C or G
actgccaccanattttttattacatcatttgaaaattagcagtatgcttaatgaaaatttgttcaggtataaatgagcagttaagatataaacaatttatgcatgctgtgacttagnnctatggatttattccaaaattgcttngtcaccatgcanngtctgtattnnttatatatgtgnnnatatatacataatgattataatacataataagaatga

SEQ ID NO: 1763 - DNA, 292 bp, Homo sapien
  misc_feature (1)...(292): n = A,T,C or G
actacaaatgnntgccataaaacctactatactcgtcacacaggntttaagactttgcaagaattgtcatcaaatgatatgcttttacttcaacttagaactggaatgacactttctgggaacaatacaatttgctttcatcatgtaaaaatttacattgacagatttgaggatttacagaagtcatgttgngacccatttaacatacacaagaaattagccaaaaaaaatttgcatgtaattgacttanatgatgccacttttctgagtgctaaatttggaagacagcttg

SEQ ID NO: 1764 - DNA, 150 bp, Homo sapien
gcaactccatgcaaaccatccaaaagaccaccacccgccggatagtggatggcaaagtggtgtctgagaccaatgacaccaaagttctgaggcattaagccagcagaagcagggtatcctttggggagcccgaagccaataaaaagttca

SEQ ID NO: 1765 - DNA, 463 bp, Homo sapien
  misc_feature (1)...(463): n = A,T,C or G
actgcaacnactgctatctcagattcaaatctggacggccaaccgccatgtgatgtaagcctccatacgaaagcactgttgcagatagaagaagaggtggttgctgctcatgtagatctataaatatgtgttgtatgtcttttttgctttttttttaaaaaaaagaataactttttttgcctctttagattacatagaagcattgtagtcttggtagaaccagtatttttgttgtttatttataaggtaattgtgtgtggggaaaagtgcagtatttacctgttgaattcagcatcttgagagcacaagggaaaaaataanaacctacgaatatttttgaggcngataatgatctagtttgactttctagttagtggtgttttgaagagggtattttattgntttttaaaaaaaaggttcttaaacattatttgaaatagttaatataaatacataattgcat

SEQ ID NO: 1766 - DNA, 336 bp, Homo sapien
acatattcaccttgaagaggaagacggggcggaagaccaagatcatcgagatgatgccagaattccagaaaagttcagttcgaatcaagaaccctacaagagtagaagaaattatctgtggtcttatcaaaggaggagctgccaaacttcagataataacggactttgatatgacactcagtagattttcatataaagggaaaagatgcccaacatgtcataatatcattgacaactgtaagctggttacagatgaatgtagaaaaaagttattgcaactaaaggaaaaatactacgctattgaagttgatcctgttcttactgtagaagagaagt

SEQ ID NO: 1767 - DNA, 553 bp, Homo sapien
actagtgatattttgggtgttttttttaaatgaatgtatatactttttttttgaagagtggagagtagtgatgtctagagggagctattttgtgctgaggccactatgttctgtaaatatataattttaagagcaacctcacaatccctgctaagtggagtttattatttgaagactaaaatggaattccatagttcctgataggttatattctgagttattattctgagttatctacaaacatttttgagatttgtctttacactctgattgtagtttccagcagcccatgcacactgccaagtaagtctcattttttcctgttagaaatggtgaaatatcatataatcacttataaagaaaactgatatgaaaaaattttagagttgtttgctttatggtcactcaagtagggtaagtgttccacaaattccacaagttgatagtttaacatggatgtctgaaagccacatatataatttcttaggattcttaaattagtaaatctagcttactgaagcagtatttagcatcactattttagattgcaaaa

SEQ ID NO: 1768 - DNA, 501 bp, Homo sapien
acactttgagacgcaggaagcagctgaaagagctattgaaaaaatgaatggaatgctcctaaatgatcgcaaagtatttgttggacgatttaagtctcgtaaagaacgagaagctgaacttggagctagggcaaaagaattcaccaatgtttacatcaagaattttggagaagacatggatgatgagcgccttaaggatctctttggcaagtttgggcctgccttaagtgtgaaagtaatgactgatgaaagtggaaaatccaaaggatttggatttgtaagctttgaaaggcatgaagatgcacagaaagctgtggatgagatgaacggaaaggagctcaatggaaaacaaatttatgttggtcgagctcagaaaaaggtggaacggcagacggaacttaagcgcaaatttgaacagatgaaacaagataggatcaccagataccagggtgttaatctttatgtgaaaaatcttgatgatggtattgatgatgaacgtct

SEQ ID NO: 1769 - DNA, 348 bp, Homo sapien
  misc_feature (1)...(348): n = A,T,C or G
acccatcctggatgccaatcagctggaagtcattccttttgatgttggggacatccatattatgagttgacgggcagatatcttcatatttcttcccagtaaagatgtcaataccaaccagatggaccttggcgtggccgtgcttgccagtcttcgaagtagacatctcgacgatcttacatggccggcctttgagcaccacaaagccattcttacgtaatgctgagcactgcattgggaaggtggctgaggcccctgcatctcctgtctcgaagtccaagtcatctgccattttaagaggcttngattccaactngcgcgaacgcactgactcgaccccgtacctcg

SEQ ID NO: 1770 - DNA, 423 bp, Homo sapien
  misc_feature (1)...(423): n = A,T,C or G
actgagatacatggggccgaaaaggggtaatatggccatcttttatcagaaaaagtgacaaaacgggaatttaaaaaatgaattttccatctgactttatttccaaatacactttcttttttaaaaaaccaatacactttctttgaggatgacagtattaggaaatccaattatacaaaaaatactacatntagtnnggggtanatatatttatttgttggtaacatacattaagnggcactaattacacagtaactataaggtaactaacatgaaaccacagaactgtaactctgccacagctgcatgaacttgggcttttctggttgagcccattttcaaaaaactgcccaccccanagctatgccaacaaaatctgntacggagtaaagccctgaagtggtgactcaccaggagtacctg

SEQ ID NO: 1771 - DNA, 541 bp, Homo sapien
acacttgaaaccaaatttctaaaacttgtttttcttaaaaaatagttgttgtaacattaaaccataacctaatcagtgtgttcactatgcttccacactagccagtcttctcacacttcttctggtttcaagtctcaaggcctgacagacagaagggcttggagattttttttctttacgattcagtcttcagcaacttgagagctttcttcatgttgtcaagcaacagagctgtatctgcaggttcgtaagcatagagacggtttgaatatcttccagtgatatcggctctaactgtcagagatgggtcaacaaacataatcctggggacatactggccatcaggagaaaggtgtttgtcagttgtttcataaaccagattgaggaggacaaactgctctgccaatttctggatttctttattttcagcaaacactttctttaaagcttgactgtgtgggcactcatccaagtgatgaataatcatcaagggtttgttgcttgtcttggatttatatagagcttcttcatatgtctgagt

SEQ ID NO: 1772 - DNA, 201 bp, Homo sapien
acaaagttggctatgtgaccctgatgcaatggagcagggagaaacacctttaacaatgcttcagagtcaggttcccaacattgttaaagctcttcacaaacagatgaaagaaaaaagtgtgaagacccgacagtgttgttttaacatgttaactgagctggtaaatgtattacctggggccctaactcaacacattcctgt

SEQ ID NO: 1773 - DNA, 505 bp, Homo sapien
gttttttgaagacagacacagtgcaatcaaactgaggccgaaggaaggggagacatactttgatgttgtggctgtcgttgaccctgtcaccagagaagcacagagacttgctcctttgctcttggttttggctcagctgataaacatgaatctgagagtatttatgaactgccaatccaaaccttctgacatgcctttaaaaagcttttaccgttatgtcttagaaccagagatttctttcacttcagacaatagttttgctaagggtccaatcgcaaaatttttggatatgcctcagtctccactgttcactctgaatttgaacacacctgagagctggatggtagaatctgtcagaacaccatatgatcttgataatatttatttagaagaggtggacagtgtagtggctgctgagtatgagctggaatacctgttactggaaggtcattgctacgacatcaccacaggccagcctccacggggactacagtttaccttagga

SEQ ID NO: 1774 - DNA, 446 bp, Homo sapien
gcaaattccagtgtgcagaccacaacctcaaaacaaaaaagatctatttctactggatctgcagggagacaggtgccttttcctggttcaacaacctgttgacttccctggaacaggagatggaggaattaggcaaagtgggttttctaaactaccgtctcttcctcaccggatgggacagcaatattgttggtcatgcagcattaaactttgacaaggccactgacatcgtgacaggtctgaaacagaaaacctcctttgggagaccaatgtgggacaatgagttttctacaatagctacctcccaccccaagtctgtagtgggagttttcttatgtggccctcggactttggcaaagagcctgcgcaaatgctgtcaccgatattccagtctggatcctagaaaggttcaattctacttcaacaaagaaaatttttgagttata

SEQ ID NO: 1775 - DNA, 251 bp, Homo sapien
  misc_feature (1)...(251): n = A,T,C or G
aagagttnancggaaaggggaaaggatgataaagacaatgtcatgagatgtcagagaaaatactaatttcataatgcagctcaacaatagaaatcaatttcaaaatgaaatatgatgcataaactaagattaaagttagttaatgtggctgggcatagcagatgggactcttagaagaggtggcctccagggtggcanngccattgccctggcntcaggctcctgttccctcctgggcccaccaagttcac

SEQ ID NO: 1776 - DNA, 204 bp, Homo sapien
acacactttcatttagtaattaaattttagtcagattttgcccaacctaatgctctcagggaaagcctctggcaagtagctttctccttcagaggtctaatttagtagaaaggtcatccaaagaacatctgcactcctgaacacaccctgaagaaatcctgggaattgaccttgtaatcgatttgtctgtcaaggtcctaaagt

SEQ ID NO: 1777 - DNA, 351 bp, Homo sapien
  misc_feature (1)...(351): n = A,T,C or G
aatacattctcatnntacaaaggcaatttaatggaagaatcttccttttgatatttgaatcatctgaaataacacaaacagaacaatacattcaaagaaatctcatttgcataacaaaaagacaagttaaacaacaaaaaaatttttcctttctcacaggtggacattgaagtggacctaattcggttttccttttaaaagccccgcaaacaaaagtnngtttaaaacctatttaaaatgaataaaaaattggtttactaaactactggtctccagcaccattttctgttttctgttgtttggatgcangttcttctttgtctagtttcttctcttgctcttttcacaggt

SEQ ID NO: 1778 - DNA, 344 bp, Homo sapien
tcctgttcgacagtcagccgcatcttcttttgcgtcgccagccgagccacatcgctcagacaccatggggaaggtgaaggtcggagtcaacggatttggtcgtattgggcgcctggtcaccagggctgcttttaactctggtaaagtggatattgttgccatcaatgaccccttcattgacctcaactacatggtttacatgttccaatatgattccacccatggcaaattccatggcaccgtcaaggctgagaacgggaagcttgtcatcaatggaaatcccatcaccatcttccaggagcgagatccctccaaaatcaagtggggcgatgctggcgctgagt

SEQ ID NO: 1779 - DNA, 414 bp, Homo sapien
attttttttagtagagatggggtttcaccgtgttagccaggctcatcttgaactcctgacctcaggtgatctgcctgccttggcctcccaaagtgctgacattacaggtgtgagcccctgtgcctgaccaaagtgaatgctttctaatccatttctgcttggagccttgaataaacatacataagggattctgatgaaaatgtccagaatgagactctggcatctgcatttttaacaagctcttaggtgactctgctttatatccagagttgaaggcccctggtctagacagggtatctaagaatcaccagggtaaagaagaatttttccaatacatttctggttccctaaaaagatattgtctggagaaaatcatgtagttggaaatgtgcttgcgagggattggaggctgtt

SEQ ID NO: 1780 - DNA, 392 bp, Homo sapien
  misc_feature (1)...(392): n = A,T,C or G
acaagtctttgatngnagtagagtataagcctgtgtcggccactggagctgaggacaaagataagaagaagaaagaaaaagaaaataaatctgaaaagcagaataagcctcagaaacaaaatgatggccaaaggaaagacccttctaaaaaccaaggaggtgggctctcatcaagtggagcaggagaagggcaggggcctaagaaacagaccaggttgggtcttgaggcaaaaaaagaagaaaatcttgctgattggtattctcaggtcatcacaaagtcangaaatgattgaatacncatgacataaagtggcntgttatattcttcngtccctgggcctatgccatttgggaagccatcaaggacnttttttgatgctgagatcaagaaa

SEQ ID NO: 1781 - DNA, 195 bp, Homo sapien
acttgttgttgctttgtttggagggtgtggtggtctccactcccgccttgacggggctgctatctgccttccaggccactgtcacggctcccgggtagaagtcacttatgagacacaccagtgtggccttgttggcttgaagctcctcagaggagggtgggaacagagtgaccgagggggcagccttgggctgac

SEQ ID NO: 1782 - DNA, 385 bp, Homo sapien
actcaacctaagttcggttccgatgaattcttatcccctgccccttcctttaaaaaacttagtgacaaaatagacaatttgcacatcttggctatgtaattcttgtaatttttatttaggaagtgttgaagggaggtggcaagagtgtggaggctgacgtgtgagggaggacaggcgggaggaggtgtgaggaggaggctcccgaggggaaggggcggtgcccacaccggggacaggccgcagctccattttcttattgcgctgctaccgttgacttccaggcacggtttggaaatattcacatcgcttctgtgtatctctttcacattgtttgctgctattggaggatcagttttttgttttacaatgtcatatactgccatgt

SEQ ID NO: 1783 - DNA, 192 bp, Homo sapien
  misc_feature (1)...(192): n = A,T,C or G
aagatccatgctaaattccccatcctgcagcagtgagtcccggatcaccgaacatttctggcccccaagtgtcagcccattcacgtaaaaacttgaccggtctttgccaaccaggacacccacctcagctggcgtgatgttgacgaacgttttcccggggacggcggcccanacggagggcgagtccttgta

SEQ ID NO: 1784 - DNA, 602 bp, Homo sapien
actgccgcaaggcttcacagacagcccccattacttcagtcaagcccaaatttcatcctcatctgttacctatctcagcataattctcataaaaacacaggtgctctccctgctgatcgtgtccgattaatctcccaaacctcaatcccttacaaaagaacaactcctttccttcctaggcatggttagtgtggtcagaattcttacacaagagccaggactgcaccctgtagcctttctgtcgagcacatcaaggcttatgtcaccaaatcccccgttgatgcaggcaaagctgtgattgtcattcaagatatatttggctggcagttgcccaataccagatatatagctgacatgatctcaggaaatggatacacaaccattgttccagacttctttgtagggcaagagccttgggacccctctggcgactggtctatcttccctgagtggctgaaaacaagaaatgcccagaagatcgatagagagatcagtgctatcttgaagtatctgaaacaacagtgtcatgcccagaaaattggcatcgtgggattctgctggggtggaactgctgtccatcatttgatgatgaaatactcaga

SEQ ID NO: 1785 - DNA, 250 bp, Homo sapien
acaaccgcttgggaaaagatccgtttcttagcaaactaaacctatacctaccatataatctaagaattcgaatcctaggtatttctcaagagaaatgatattatttagattccatttatacgaagttctgaaacagaaaactaatctgcggtgggaaaacagttaagacagctgttgccttgagagggtgtgaatggagaccgactgagaagagacatgaggcaactccaaagtgatgcttatagtctgt

SEQ ID NO: 1786 - DNA, 91 bp, Homo sapien
  misc_feature (1)...(91): n = A,T,C or G
acttgtggaagatggccacgaggaggccaatggcctgatccagggggcatgccatggctganngctgggcttggagcggtagggaggcggc

SEQ ID NO: 1787 - DNA, 370 bp, Homo sapien
gcgcagcagctgtgcccggcagtctagaggcgcagaagaggaagccatcgcctggccccggctctctggaccttgtctcgctcgggagcggaaacagcggcagccagagaactgttttaatcatggacaaacaaaactcacagatgaatgcttctcacccggaaacaaacttgccagttgggtatcctcctcagtatccaccgacagcattccaaggacctccaggatatagtggctaccctgggccccaggtcagctacccacccccaccagccggccattcaggtcctggcccagctggctttcctgtcccaaatcagccagtgtataatcagccagtatataatcagccagttggagctgcaggggt

SEQ ID NO: 1788 - DNA, 249 bp, Homo sapien
acactgaagcagaaccggaaacacccaggaactgttcagaaatctcagaagaaatctgcttctcttcgatggaaagatataattaacgatcaaagagctctaagaaaattgcaaagaagccttaatgttcaagctttagaaagatcagagcaatttttctctttcagtccaaactaagactctctgtatttaaatctctctggggcaagagggctagatttcctcattttgttatgagactagattggt

SEQ ID NO: 1789 - DNA, 346 bp, Homo sapien
acagagagaggaagaagctattcagttggatggattaaatgcatcacaaataagagaacttagagagaagtcggaaaagtttgccttccaagccgaagttaacagaatgatgaaacttatcatcaattcattgtataaaaataaagagattttcctgagagaactgatttcaaatgcttctgatgctttagataagataaggctaatatcactgactgatgaaaatgctctttctggaaatgaggaactaacagtcaaaattaagtgtgataaggagaagaacctgctgcatgtcacagacaccggtgtaggaatgaccagagaagagttggttaaaaaccttggt

SEQ ID NO: 1790 - DNA, 529 bp, Homo sapien
  misc_feature (1)...(529): n = A,T,C or G
acatgccctttatgaagatattcttgagggaaaacaccaccaagcaagtgaaacacataatgtgattgcatcagacaaagcagcagaaaaatcagttgtccatgaacatgagcacagccacgaccacacacagctgcatgcctatattggtgtttccctcgttctgggcttcgttttcatgttgctggtggaccagattggtaactcccatgtgcattctactgacgatccanaagcagcaaggtctancaattccaaaatcaccaccacgctgggtctggttgtccatgctgcagctgatggtgttgctttgggagcagcagcatctacttcacagaccagtgtccagttaattgtgtttgtggcaatcatgctacataaggcaccagctgnttttggactggtttccttcttgatgcatgctggcttagagcggaatcnaatcagaaagcacttgctgggtctttgcattggcagcaccagttatgtccatggtgacatacttaggactgagtnagagcagtaaaga

SEQ ID NO: 1791 - DNA, 379 bp, Homo sapien
accccgccatggccgccatcaatgcacgcaagatgaaatttgctctgctaaaaggctccttcagtgagcaaggcatcaacgagtttctcagggagctctcttttgggcgtggctccacggcacctgtaggaggcggggctttccctaccatcgttgagagagagccttgggacggcagggatggcgagcttcccgtggaggatgacattgacctcagtgatgtggagcttgatgacttagggaaagatgagttgtgagagccacaacagaggcttcagaccattttcttttcttgggagccagtggatttttccagcagtgaagggacattctctacactcagatgactctaccagtggccttttaaccaagaagtagt

SEQ ID NO: 1792 - DNA, 283 bp, Homo sapien
acccttggggaacacaaatacacttagcatataatgtagccagtaataactagcaccacagctacatggaaatcctttacatacaccaacttggctttcacttttaaaacaaaactcagaatccatggctcagtaggataactataattgtgttgctctgctttttaacaggtctacataagttaatagcactagcaaaaatcaaagaatagcttcagacctcttacaagtttaggagacagtgctagtgaccacaaatagactcactacctgatgtccaagt

SEQ ID NO: 1793 - DNA, 340 bp, Homo sapien
acatggtgacttgggttttgtttctgcatctgtcacttggcgaatgaagataccatcttcaggatgttctgtgtcatccatttcatacatatatgatgacgctattacaagcgtagtcccatcattactgaaggcaagtgatgcgatgctcgtggggtaccgatggaattggcacagtcgctttttgttaaatggatcccaaatatttacaaagccatcagaaccacctgtggcaaatgtattgtggatattgtgaaaagaaatggcattgactgggtaaatctgctcaatattattttcttttagtctgtgacatttgaaggcatacttcttcttctgt

SEQ ID NO: 1794 - DNA, 345 bp, Homo sapien
acattcacaacttatgtttctttgagattaatagatattgggggaaaaacgcctttttaggaaaattatagtgaaaatttgacagttgattggcataatttcttgtttgaatgctgcctccattatataggtccttccaggaactcaaacactgtaagtgaaatatgggagtatagtttttattatttcttcttttccttttgttttcataatataatgcagtttgttcaggaaatcagcacaaagcctgatagtacacactgtgacctgatcatcctgaaaaactttatgggggagaaaggtcaacagcttctctttctttttcttgaaaataataaaactgcg

SEQ ID NO: 1795 - DNA, 256 bp, Homo sapien
  misc_feature (1)...(256): n = A,T,C or G
cgcagccatgagtatgctcaggcttcagaagaggctcgcctctagtgtcctccgctgtggcaagaagaaggtctggttagaccccaatgagaccaatgaaatcgccaatgccaactcccgtcagcagatccggaagctcatcaaagatgggctgatcatccgcaagcctgtgacggtccattcccgggctcgatgccggaaaaacaccttggcccgccggaagggcangcacatgggcataggtaagcggaagggt

SEQ ID NO: 1796 - DNA, 178 bp, Homo sapien
  misc_feature (1)...(178): n = A,T,C or G
acctgtcacacnacgtccacctggtgtgcgaggagacagccaattacctggtcatttggtgcattgacctannggtggaggagaaatgtgcactcatggagcanngtggcccaccanacaatcgtnatgcaatttatcctggagcntggccaagagcctaaaggtggacccccgggcc

SEQ ID NO: 1797 - DNA, 313 bp, Homo sapien
accttacatttagttaaatataaacatttgttatttatacataaaactgctttcaaaaaacaactaataaatgatttaattgcacttgttttacttcttgtaattcccaagtgttaacttttcttagattgaaatcaactgtcccctagtgcacttttatttttagttcgtgtcctaataaattcaaacctttaaaagtcccatcacctaatgcataaatatacaaaaatgccaaaaattaatcccttttagttggatcatattttatgctgactttttatagccaaataaccagaaatggtttccttctgca

SEQ ID NO: 1798 - DNA, 447 bp, Homo sapien
gctcaacattgacatcccccgatctaggattactctggacctcattcgggtgttatgagtatcccacgaaggccagacgctgattttattttctcatttccacagattgacaaggataagtcagttgtttgtaaactctaggtagcagatgagaaataattcacttaatatcagaaatattttccaaacactttcctttattttttcttctgaataaatagaaaaccaacagtttgatttccttttcccttaaaggaaacaactaatacacattcttatatggctttatgtagtaatagttttctgactaaaattttgttttttattttttgtaatttatctttaactccttttgcattttgtataacagattgcttaacttctacttgccaacatctgccttgctggacttgtatgggattgtcttcttgatttgaattgtacctc

SEQ ID NO: 1799 - DNA, 321 bp, Homo sapien
actgaatacttcggcaaacttattgggtcttcattttctgacagacaggatttgactcaatatttgtagagcttgcgtagaatggattacatggtagtgatgcactggtagaaatggtttttagttattgactcagaattcatctcaggatgaatcttttatgtctttttattgtaagcatatctgaatttactttataaagatggttttagaaagctttgtctaaaaatttggcctaggaatggtaacttcattttcagttgccaaggggtagaaaaataatatgtgtgtcgttatgtttatgttaacatattattaggt

SEQ ID NO: 1800 - DNA, 422 bp, Homo sapien
  misc_feature (1)...(422): n = A,T,C or G
acatgtttggaaatgagttagatacttgaaaagtctaaacacactgatttaggagtgcgtatgttgctgtctcaatgaacaatgggtcaatagttcatatggactaaattaatctctgggtagcacgtatgtgtgtaaatataaaattatattagacattagcaccagtgcagaacatgctcagcatcataagatccaaaacaccagcacaagtttatccatcattaaaaacaattacctccttcccaaaatgtcagaatagtaggtaacntgagattaataaatcttatccaaaaagtaacntcttataacataaaagtttcttttagaagtatatgtgaggaaccaatcagcntaaatangaaatgttttaaggattgaagatgtccaatattttttaaaactggacattaccatataca

SEQ ID NO: 1801 - DNA, 429 bp, Homo sapien
  misc_feature (1)...(429): n = A,T,C or G
acagtaatttgcagtaactacagatactgttccacagtatatataattatgactgataagatgtagagcattaaatttagagttagcttattctgataagtcaatattagactgttcattaactctgcattaactatagaaaggttgttagttaatgcttatttaaaaaccccaaaccattccatttacaagagaaattgttgcaaatgtataaaacagcagatatacaaggagaacaccaaacatactttattagcacaaaaaaagcagccataacaaggcacagcaagcagaaacatacattagcagtcaaaaggttagtgttgcatacaaatatagctttccttttttgtagccttggcaatagccatagggatgtaaaataacattctgtagcagcaggtaangaaactatggagcactcaccag

SEQ ID NO: 1802 - DNA, 311 bp, Homo sapien
acaaaacaacaaaatatatatatattctcatatatatatatatagctgataaaattacctgaggagtgtaatgcttatttttttgtgtatatctttgcaatctattttatatatattgacaaaagagactgtgaaatacttagccatgcagaatatgtgaccagaccagagcatgtgtaggaagactttacggtaatcatcaactctaccccgaaatgatggactacaagttataatgtgtgttacctacacttcaatcagtaatattagcaaatctccaaatgttagtcacattggtttgtctcccttgt

SEQ ID NO: 1803 - DNA, 279 bp, Homo sapien
acaaaaaaaccttacataaattaagaatgaatacatttacaggcgtaaatgcaaaccgcttccaactcaaagcaagtaacagcccacggtgttctggccaaagacatcagctaagaaaggaaactgggtcctacggcttggactttccaaccctgacagacccgcaagacaaaacaactggttcttgccagcctctagagaaatcccagaacactcagccctgacacgttaataccaaggggaacagttaacttcaatacaaggtcaaaatcagcaaca

SEQ ID NO: 1804 - DNA, 200 bp, Homo sapien
  misc_feature (1)...(200): n = A,T,C or G
acaatttaattntgcttccagtctcaagcacttaagaacaatttttggaatctttcaggttaactaaaaaggttatatcaacaagcaaaactcccaaaagattaggtaagaaaaaattagttaactgctttaaaaatatccaactcactttcttcattgattaggagtaactgggaaatatctctgtcctgataacttgg

SEQ ID NO: 1805 - DNA, 310 bp, Homo sapien
  misc_feature (1)...(310): n = A,T,C or G
acatcacctgctgaggaaggataaatcttcctgctttaanngagccctgtcatctctcctcttaatgcacgtttcccttggtattagtggaagctgtgttcaagatgggaagcccttcctgcagttcttagaaacacctgctttctaaggagagccttttctaggattagcttatgtgtgttttctctaggcgattttttatttcagttaccaatttaattttcaagttgacagatgctgtgtaaagtctctcataatgagagtagtccattaaattgttgaaagttgcactgcttttcatctttcaggt

SEQ ID NO: 1806 - DNA, 293 bp, Homo sapien
  misc_feature (1)...(293): n = A,T,C or G
actcatttcaatgngttgccgtgccactaagcagttccatcttccactggattcatcatagtcacaaatatccatgaccgaatagttctgaatcctcctgagccactgcaaagaaattctttcttgtgttgcccatgtcncatcacacaagtagtgatcccctatcaacatagaggcaggagcagtgatttgtatggaagttgcattggtgactgagctgagagagtctgtatttacaacaaaggaactttacagttggattcacagctcctgcctttggatatggaacccgt

SEQ ID NO: 1807 - DNA, 481 bp, Homo sapien
  misc_feature (1)...(481): n = A,T,C or G
cgctctcagctctcggcgcacggcccagcttccttcaaaatgtctactgttcacgaaatcctgtgcaagctcagcttggagggtgatcactctacacccccaagtgcatatgggtctgtcaaagcctatactaactttgatgctgagcgggatgctttgaacattgaaacagccatcaagaccaaaggtgtggatgaggtcaccattgtcaacattttgaccaaccgcagcaatgcacagagacaggatattgccttcgcctaccagagaaggaccaaaaaggaacttgcatcagcactgaagtcagccttatctggccacctggagacggtgattttgggcctattgaagacacctgctcagtatgacgcttctgagctaaaagcttncatgaangggctgggaaccgacgaggactctctcattgagatcatctgctccagaaccaaccaggagctgcaggaaattaacagagtctaca

SEQ ID NO: 1808 - DNA, 289 bp, Homo sapien
  misc_feature (1)...(289): n = A,T,C or G
ttggttctctcttctaagtttctgcccctctgcttccttactttttttcctttttgaattctatctttatctgtcttttgttcactttttaatgctatatatgggcaggggtgagagacattactgannaccttggtgagcaagcctggctttaaagattggagaagagcttctggcaccagaaccctgtcttcctccagttctcaacacggtngttgcntcttcagtcataccggaatctgaatcaaaaaagtattttaaatatccatgatttctccctgtattgagg

SEQ ID NO: 1809 - DNA, 345 bp, Homo sapien
acactgatctgagatcgcaccactgcactccggcctgggcgacaaagtgagactgtctaaaaaataataataataaaaagcattttgaaattagtcgtggtcaatgtaattctactctttggaatccgtttagctaaatgaatgtagtgctcttgttgaatggaaacaggtgataggaaatgcctaccatttgactcaatatggataatcaagagttgctcaggatgcttggatctgggggtagattctcattcatcattgccctggcacatgtcaattactacataaaaggtcaaatgcaatgtcaaatccaaagcctcaggaggaaagtgagttcagttccca

SEQ ID NO: 1810 - DNA, 212 bp, Homo sapien
actcccgattgaagccccattcgtataataattacatcacaagacgtcttgcactcatgagctgtccccacattaggcttaaaaacagatgcaattcccggacgtctaaaccaaaccactttcaccgctacacgaccgggggtatactacggtcaatgctctgaaatctgtggagcaaaccacagtttcatgcccatcgtcctagaattaat

SEQ ID NO: 1811 - DNA, 494 bp, Homo sapien
aggacacagcatggacatgagggtccccgctcagctcctggggctcctgctactctggctccgaggtgccagatgtgacatccagatgacccagtcgccatcctccctgtctgcatctgttggagacggagtcaacatcacttgccgggcaagacagagcatttacacctatgtgaattggtatcagcagaaaccagggaaagcccctaacctcctgatctatgctgcatccattttgcgcagtggggtcccatcaaggttcagtggcagtggatctgggacagatttcactctcaccatcagtagtctgcaacctgaagattttgcaacttactactgtcaagagagtcacagttcgcctccgtggacgttcggccaagggaccaaggtggagatcaaacgaactgtggctgcaccatctgtcttcatcttcccgccatctgatgagcagttgaaatctggaactgcctctgttgtgtgcctgctgaataact

SEQ ID NO: 1812 - DNA, 386 bp, Homo sapien
actcattttttatttttaataattgctacttgaatatacagcatgtttttaaaagtaataaggtttataggaagcagggtccacagccgtagctctttcaaatattagataaataatagctctttcagttcaattatttatgaacgatagtttttctgacctaagatgctcatctacagtattcatatagattctcatattcttttaagaatctttcacacagtgtaactgtcatgcattagatatatgaaagattctgtgttgaagggtaattcaagttcatatactgtttcctggaatggtgtcacaaaatggatctcacttggcatataaactgccaagtccttatacatataaaagaaatggcaaactgccagatattgagt

SEQ ID NO: 1813 - DNA, 278 bp, Homo sapien
acagaagagagaaattcaaacaaaatattgctgttcttcagttttgtttgtggaatttgaaattactcaaatttaaaataaattactggactgtggaaataacatagaattgaagttttaattaaataccactcaaacgaaaagaacagtagtttttgtagttttatattggatactgaggcattagggaggcatgaaaggaagaggaatgaggattgagacatgtgaagacattgtgcattatatcaatgtgcattcctgtagttcattaacaaggt

SEQ ID NO: 1814 - DNA, 385 bp, Homo sapien
  misc_feature (1)...(385): n = A,T,C or G
acagcccaatacangatcatccaaaaacacgttgacacttccaagacactggcacggggtccacggagttttgcgcgtaaaattttaaaaacccttcctacggtgatgtttaaggccaggagcattcatttctcaaccttgtatcaatccaggatccatcggactaggtttcattaggcaagagagtagttcgttcctcctctgtgctgaggatgttttgagatttaggacctttttctccttgaatactncagnngataaaacaaggcccatggctaatccacttatcagagcccatangaccttgtatagctgctgcnccattcaaaaccaattttctcatacaggaaatccacccagcgttggtcccataaaagcaccaatt

SEQ ID NO: 1815 - DNA, 643 bp, Homo sapien
  misc_feature (1)...(643): n = A,T,C or G
acagggaacagatgaaccgcctctggaggaacacgtgcagtcaacaaatgaaagtctacagctggtaaaccatgaagcaaattctgtggcagtggatgttattcctcatgttgacaacccaacctttgaagaagacgaaactcctaatcaagagactgctgttcgagaaattaaatcttaaaatctgtgtaaatagaaaacttgaaccattagtaataacagaactgccaatcagggcctagtttctattaataaattggataaatttaataaaataagagtgatactgaaagtgctcagatgactaatattatgctatagttaaatggcttaaaatatttaacctgttaacttttttccacaaactcattataatatttttcataggcaagtttcctctcagtagtgataacaacatttttagacattcaaaactgtcttcaagaagtcacgtttttcatttataacaattttcttataaaaacatgttgcttttaaaatgtggagtagctgtaatcactttattttatgatagtatcttaatgaaaaatactacttctttagcttggggctacatgtgtcanggtttttctccaggtgcttatattgatctggaattgtaatgtaaaaagcaatgcaaact

SEQ ID NO: 1816 - DNA, 518 bp, Homo sapien
  misc_feature (1)...(518): n = A,T,C or G
acccaaaactgaaagaagtggatgatgtgcttggtggagcagctgcctgggagaatgttgactctactgcagagtcgtgtcccaaatgcgaacatcctcgtgcttacttcatgcagcttcagacccgctctgcagatgagccgatgaccaccttctacaagtgctgcaatgctcagtgtggacaccgctggagggattagggccaggatggcccagctgccctagtgtgtgcttgccttgtccctcggggtagatgcttagctggcagtatgagttgtgtgtcctgagggtctttgctagtgtggtggaaagataaaccttttgaggtgaagagccagggggtcaggaaatatggcctatctgccaggcagggtggatgaagtcatgaatgtctgggagtttttctgtgtggggaggagacagagacccataaactaaatatgctctgtgtaaagtcctattcttttatgttncactttattggcagtngacattcccttactcccaatcaacactct

SEQ ID NO: 1817 - DNA, 382 bp, Homo sapien
  misc_feature (1)...(382): n = A,T,C or G
accatgctgttttggttactgtagccttgtagtatagtatataaaattatttaaagcagtttaccattaaaaacatatatacaataaggctaatcaaaacgtttaaaagtgagaattagatgaaaaaaatctaggttagtttttttatacttaagcatagccgcagagcttcttaacagtcaaggcagaaataaaaatgtgtaattctactgcctgattcatatcacaagagaaagaatttttgaggtgataaattcagagatatttatctcatgtttctttaccctaagaatatagatctacataatgagtcatatcgntcaatgatatttttggagtatgcagaacattattaatgataattgcttatgtttatgtatgc

SEQ ID NO: 1818 - DNA, 144 bp, Homo sapien
  misc_feature (1)...(144): n = A,T,C or G
caagaaaccagactgngatgactgggagagcgggctgaatgcaatggagtgtgcattacatttggaaaaaaatgtgaatcagtcactactggaactgcacaaactggccactgacaaaaatgacccccatttgtgtgacttcat

SEQ ID NO: 1819 - DNA, 162 bp, Homo sapien
  misc_feature (1)...(162): n = A,T,C or G
aaattgcctgtggattattggcctctactaacttgcactgtcgtaaaaacaatttaagattcccccaattcatgtaaggcaatatcaccatgggcttttctccttcttctatacacacatgagtaataggaagaagatttctgtgatgaagacnctcgcagc

SEQ ID NO: 1820 - DNA, 201 bp, Homo sapien
tagaggagctgatgaagctttctcccgaggaattactgctgcgatgggtgaactaccatctgaccaatgcaggatggcataccatcagcaacttcagccaagacattaaggactcgagagcctattttcatctgcttaatcagattgcccctaaaggtggggaagatggacctgccattgccattgacctttcaggaatta

SEQ ID NO: 1821 - DNA, 277 bp, Homo sapien
acctctcaacattaccaaaatcatttctttagagggaaggaataatcattcaaatgaactttaaaaaagcaaatttcatgcactgattaaaataggattattttaaatacaaaaggcattttatatgaattataaactgaagagcttaaagatagttacaaaatacaaaagttcaacctcttacaataagctaaacgcaatgtcatttttaaaaagaaggacttagggtgtcagttttcacatatgacaatgttgcatttatgatgcagtttcaagt

SEQ ID NO: 1822 - DNA, 443 bp, Homo sapien
actctaatttcactaactgccaaaaggttttccagaataatctcagttgcttcattcctttaaagatgaagcccgaagaacgcatggcgattactttagaggaacaattagcagcagaggcagggctgtgctgatcccatctggcatcgctgggagctaacattaaagacatggcactttgggtccgggtccaggtcctggttcagagcagctgccacaccgtggctactagaggatccttttccggctttggaaactgaggctgactgcaccatttacagaaatttcatcatgaagatccttacacttaacaccttaaggtgatgagttttcacatgactgttttcaaggccacagccaccacctttaatcatcatcactaaaggcctgagactgctcgccgtgctcaacaccgactggagtggccatgtcttccagccacg

SEQ ID NO: 1823 - DNA, 506 bp, Homo sapien
acacagatgggaagccctaagtcatcaccagggcaactgtgggaggatccaatgccccacagaggaaagaaacagtaacctcatgtgaggaagagaagttcgtccccccgccaccctagttcctaaaaaacacctagcactttccttccggttccctcagcttttaaccaactaattatcaaacggaagaaaacataaagcgcaagacacaggagggagagagggggagaatgaaaacacaggtatttttgtgccaacatcctgcacacacaaacctggagttctccagaaattacgacaggttgggtgtggggtattagggaaggaaatagaagagttcccgaggcctgaaaaaagaggtaaacacatcacagaactagatgagagtttcattagactctaactaaaaacagagaggtgtgattactatttccagccagtttcccccatcacgataagtcatgtaacaaaccaaggcaatgtcggtcttgagccagactcacaga

SEQ ID NO: 1824 - DNA, 234 bp, Homo sapien
gtcatgacgccagtcagatcacactagccttgggcacagctgccatgctgtccaaaggagccctgaaccctgctgacatcaccgtcctgttcaagatgttcacaagcatggaccctcctccggttgaacttatccgcgttccagccttcctggacctgttcatgcagtcactctttaaaccaggggctcggatcaaccaggaccacaagcacaaatacatccacatcttggcgt

SEQ ID NO: 1825 - DNA, 321 bp, Homo sapien
acacaaagctacccaggagggttgctgaagcacatgtgcctaatttcatttttgatgagttcagaacagtgctgtaactgtttttcctacttcttcaatggaaggattgtccttagatcttcccaccatcacaaatgaatttgaagatgaaaagaaactcagttgctcatacaactgcattttttctgtctattatgggaaacatcagacgttctgagtaagatatatctcatggcattagttaatataactgatattgtttaaatcatggtattacatgcaatttatatcagataaaagcagaacacatttttgtacctg

SEQ ID NO: 1826 - DNA, 395 bp, Homo sapien
  misc_feature (1)...(395): n = A,T,C or G
actctcaaccatgatagataatgccttaacatggattttaacgtttgcaggatttgctaaattcataagatagttattacctttctttgaaatttgtaatgttttatattcttgtttcatagccatttgtcagtccacagtggtcattatggttttactttttgatagttcttacaccttgttggagaaactacaaaagaaagttgtcctcgtccttccccttagctaacatcaaaattaaaaagttgaatattaatattagctaacattaaaatggaaggtaatttcaggttttagtgttagnctaacattaacagtnctaataatttagctttgtaaattccaaggctaaaaccctttcatgggcttcacagtatttagtcctaattaaatac

SEQ ID NO: 1827 - DNA, 471 bp, Homo sapien
tttttttttaaaaattaagactggggtgatttattaatcttgttaagaactctgatacaaagcacagtaaaaggccacaaaccagtaaataaacaacgtggcttttggctattttacaactgctgctacagcactatcagcaaaacactctatcactttgaacgaaggcatccaaatggcaaataaaagctttactcacttatctgattaaaatgtttaataaagctttaagtatttgctggtttaaatattaccaatctaaaaaatatatttaaaaaaaatttcagttaacacgagatttatagagaaagttactaggtcttgaaggcaaggcagttggttcctatgccatagaattttttttgaatttatgaattagtaaagtagcagattgtattataggcctcaagtcacttaaatttatataggttattagcagtatctttaaatatacaatataaacaaaactgt

SEQ ID NO: 1828 - DNA, 422 bp, Homo sapien
  misc_feature (1)...(422): n = A,T,C or G
accattctgganngctgtccactgtatagaacatttatgaatagaaggtaaggacactctgatgattcccacgaactaggaggattggtggtaggtccttagatagagcttctaaccatgccatgtagagagcactagacacagcaccttttcgtgcaactgggagactcatgacaataatattagctgtgcttgaatgttcctttaataactcatttaacctgatctgccggtatgtcttggtcttataaagttcaagctcattatctgttattcgccatggttcatcttctttcattttatctgcaatatcttgctctttatcatcttcaggaaatcattgagccatacagacttcatgatttcctcaaaagctataatattttctttctttggtttggtattgatatctcctagaacca

SEQ ID NO: 1829 - DNA, 317 bp, Homo sapien
actcgcttttgtgggacttcttttttcactgttggtgatgacaaaactgtgaagcagtggaaaatggatgggccaggctatggagacgaggaagagccattacatacaatattaggaaagacagtgtatactgggattgatcatcactggaaagaagctgtttttgccacatgtggacagcaagtagacatttgggatgaacaaagaactaatcctatatgttcaatgacctggggatttgacagtataagtagtgttaaatttaacccaattgagacatttctcttgggaagttgtgcatctgacaggaatatagt

SEQ ID NO: 1830 - DNA, 77 bp, Homo sapien
  misc_feature (1)...(77): n = A,T,C or G
acctgcancaacccagggcagtctccacagctcttgatctatttgggttctaatcgggccgtccggggtccctgaca

SEQ ID NO: 1831 - DNA, 446 bp, Homo sapien
acttgagaccagaaactgcacaggggattttcttgaatttcaaacgacttttggagttcaaccaaggaaagttgccttttgctgctgcccagattggaaattcttttagaaatgagatctcccctcgatctggactgatcagagtcagagaattcacaatggcagaaattgagcactttgtagatcccagtgagaaagaccaccccaagttccagaatgtggcagaccttcacctttatttgtattcagcaaaagcccaggtcagcggacagtccgctcggaaaatgcgcctgggagatgctgttgaacagggtgtgattaataacacagtattaggctatttcattggccgcatctacctctacctcacgaaggttggaatatctccagataaactccgcttccgggcagcacatggagaatgaggatggcccattatgcctgtg

SEQ ID NO: 1832 - DNA, 266 bp, Homo sapien
actatctgtgaagttacacttttttttttttttaaaggtagagatgtgtgtgtgtgtaggtattaaagatgtgttgttggtttccaaaaaggaacactggaaaataaattttgaatgtttatgttctcagaatcaggttgacagtcccttgctgacatggctttgctttgtgtaaatacagtggatctcaatcttcggggtgtgatgaatagcgaatcatctcaaatccttgagcactcagtctagtgaagatgttgtcattatgt

SEQ ID NO: 1833 - DNA, 275 bp, Homo sapien
  misc_feature (1)...(275): n = A,T,C or G
acaaaagaaccacanatgcgtctctgtaggactgaaaaggtcaggacaaataatgattcttgttctaaatgcagatcctagttattttggaatgaaatgctgttttctagaaagcaacatgaaagtagcagtaagaaagatgactaccatcatttcaaaacaggataagcctaaatataatttaccatttatatgtcaacaaattaaggaaaactgtataaagttcctagtggtttcatataggccaaggagactgtatctgtcccacccacagt

SEQ ID NO: 1834 - DNA, 202 bp, Homo sapien
acagtatgatgcgcaaggaatggcctttagcaaaagcgaaggtaaaagaaagactgcaaaagcagaagcaattgtttataaacatggaagtggaagaataaaagtaaatggaattgattaccagctttacttcccgatcacacaggacagagaacagctgatgttccctttccactttgttgaccggctgggaaagcacgac

SEQ ID NO: 1835 - DNA, 176 bp, Homo sapien
acttctacctctcacttctaattaaacatggaagaaaacagactggctaatttggtcacactttgtccaaatacagtgttgacttaatggagcccttaaatatccaaaataataagtgaatgctatttataagacaataaaaagttttaaaatcttccaaatgtgctgttaacagt

SEQ ID NO: 1836 - DNA, 330 bp, Homo sapien
acctcgcaaaccaagccaagaaccagtcagatgaggcaaaagaggctaaggggagtgggtatgagaaattagggcccagtcgagacccagatccactgaacatctgtgtctttattttgctgcttgtatttattgtagtcaaatgctttacatcagaatgatgaaaataggcttgccactttctcttattttaattccatggtagtcaatgaactggctgccactttaatataactgaaaattcattttgagaccaagcaggatcaagtttgtagaataaacactggtttcctagctatcctctgaaaacagtatgaaacatgaccaagt

SEQ ID NO: 1837 - DNA, 170 bp, Homo sapien
  misc_feature (1)...(170): n = A,T,C or G
acaaaaccaantgcaaatatcaaactattacacaacaaaggaactcaacattaaggggacactgcctaatgataacaaaaacttaagttataattagagtttcagagatagatttagattggggtttctgtatttttcttacatcagctggaaacttatgcaccaattat

SEQ ID NO: 1838 - DNA, 444 bp, Homo sapien
accgcattacattatgcctgtgaaatgaaaaaccagtctcttatccctctgctcttggaagcccgtgcagaccccacaataaagaataagcatggtgagagctcactggatattgcacggagattaaaattttcccagattgaattaatgctaaggaaagcattgtaatccttgtgaccacaccgatggagatacagaaaaagttaacgactggattctatcttcattttagacttttggtctgtgggccatttaacctggatgccaccattttatggggataatgatgcttaccatggttaatgttttggaagagctttttatttatagcattgtttactcagtcaagttcaccatggccgtaatccttctaagggaaacactaaagttgttgtagtctccacttcagtcagaaactgatgtttcagctaggcacagtggtac

SEQ ID NO: 1839 - DNA, 310 bp, Homo sapien
acaagctttttggagaaaagaaaaagaacagcagctattacatgataaacagatggaagaagaaaagcagcaaacagaaagggttacaaaagagatgaatgaatttatccataaagagcaaaatagtttatcactactagaagcaagagaagcagacggtgatgtggttaatgaaaagaagagaactccaaatgaaaccacatcagttttagaaccaaaaaaagagcataaagaaaaagaaaaacaaggaaggagtaggtcgggaagttctagtagtggtagttccagtagcaatagcagaactagtagt

SEQ ID NO: 1840 - DNA, 381 bp, Homo sapien
acgacgaaattgaggccgaggtgaatctatgttttgactaatttgtttacaagctagcagaccagatatttgcctattataaggttatggcaggaagtttgcttcttgataaacggttacgatcagaatgcaagaatcagggagccacgatccacctcccgccgtctaaccgctacgagacgctgctgaagcagaggcatgtgcagctcctcggcagatcaatagacctcaatcgtctgatcacccagcgcgtctcagcagccatgtataagtccctagaactggcgattggacgatttgaaagtgaagatttgacctccatagttgagctggatggcctgttggaaatcaaccgcatgacccacaagctgctgagccggt

SEQ ID NO: 1841 - DNA, 138 bp, Homo sapien
  misc_feature (1)...(138): n = A,T,C or G
acatgacaaggtgcggctccctanncccctcccctcttcaaggggtctacatggcaactgtgaggaggggagattcagtgtggtgggggactgagtgtggcagggactccccagcagtgagggtctctctcttcctct

SEQ ID NO: 1842 - DNA, 142 bp, Homo sapien
  misc_feature (1)...(142): n = A,T,C or G
acaggcactttctgagaaacctttgtcctcacttgaggcattttgttgtcgggtttttgagttnntttttgtgggtattngcctcattccacccctgagctttcaggtanacagacgtgattcaaaactctgttctaaggtg

SEQ ID NO: 1843 - DNA, 338 bp, Homo sapien
  misc_feature (1)...(338): n = A,T,C or G
accctttnngctcttggccctcnngtcctgtcctggaccattggcaatataacagagacagctttctgcttctcaagaaaggattttttttacatcatcagaaaacatcaagtgaatcaagaaagaatagagctctgaggaccactgaagattcatgaggatctttgtgaatgctctgcagatgaaaaaggtattggggatcactttgaaatatggagttagggagggagactatgaagaaaaaagaaaaaaacttggagagaaggaacaccttgaagatgaagacattgcatctagaatgaagggtgaaaaaaaagctgatacatttcaatcaatgt

SEQ ID NO: 1844 - DNA, 398 bp, Homo sapien
acactgttaagaagttgagcttttatcttagaggcagcagaaggtttggagccaaggaatgaaatgatgaggcgtccttcaggtaatgaacttcagctgcagtgtgaaaggggcaggaagactggcagctgtcaaaactggaacagtccagtgagtatgtgcaggcccgggcttgggcagtgacgagggcagggagcacacatcaatttctgcggtagaaccttctagaggaagaccagacagagggtcaacagagttgaaaggagaaaataattgaggatgaggtccaagtttttagtttcagagactaggcatatggttaatatttaggtagaaaattcaggaaaaggagcttgtggggcaggaagggaaggaacggcagcttggggcactctgaa

SEQ ID NO: 1845 - DNA, 135 bp, Homo sapien
  misc_feature (1)...(135): n = A,T,C or G
cttcaccctaggcctggacccaggcccagtttccaaagcaagcagnacacanngcatgttcacataagcatgggggctggggggacactggggcttactgatctttttctaggggcctccagcccctggcaccac

SEQ ID NO: 1846 - DNA, 560 bp, Homo sapien
actggtccaggagttatccaggatagattttcacccaccatgggacgtcatcgttcaaatcaactcttcaatggccatgggggacacatcatgcctcccacacaatcgcagtttggagagatgggaggcaagtttatgaaaagccagattagcctgaggcctgctcagtcgttcctaatgaataaaaatcaagtgccaaagcttcagccccagataactatgattcctcctagtgcacaaccaccacgcactcaaacaccacctctgggacagacacctcagcttggtctcaaaactaatccaccacttatccaggaaaagcctgccaagaccagcaaaaagccaccaccgtcaaaggaagaactccttaaactaactgaaactgttgtgactgaatatctaaatagtggaaatgcaaatgaggctgtcaatggtgtaagagaaatgagggctcctaaacactttcttcctgagatgttaagcaaagtaatcatcctgtcactagatagaagcgatgaagataaagaaaaagcaagttctttgatcagtttactcaaaca

SEQ ID NO: 1847 - DNA, 485 bp, Homo sapien
aaaagattgatcgccgttctggtaaaaagctggaagatggccctaaattcttgaagtctggtgatgctgccattgttgatatggttcctggcaagcccatgtgtgttgagagcttctcagactatccacctttgggtcgctttgctgttcgtgatatgagacagacagttgcggtgggtgtcatcaaagcagtggacaagaaggctgctggagctggcaaggtcaccaagtctgcccagaaagctcagaaggctaaatgaatattatccctaatacctgccaccccactcttaatcagtggtggaagaacggtctcagaactgtttgtttcaattggccatttaagtttagtagtaaaagactggttaatgataacaatgcatcgtaaaaccttcagaaggaaaggagaatgttttgtggaccactttggttttcttttttgcgtgtggcagttttaagttattagtttttaaaatcagtacctg

SEQ ID NO: 1848 - DNA, 420 bp, Homo sapien
actggcacgctctatagccaaggaaggcttcgagaagattagcaaaggtgctaatccagtggaaatcaggagaggtgtgatgttagctgttgatgctgtaattgctgaacttaaaaagcagtctaaacctgtgaccacccctgaagaaattgcacaggttgctacgatttctgcaaacggagacaaagaaattggcaatatcatctctgatgcaatgaaaaaagttggaagaaagggtgtcatcacagtaaaggatggaaaaacactgaatgatgaattagaaattattgaaggcatgaagtttgatcgaggctatatttctccatactttattaatacatcaaaaggtcagaaatgtgaattccaggatgcctatgttctgttgagtgaaaagaaaatttctagtatccagtccattgt

SEQ ID NO: 1849 - DNA, 200 bp, Homo sapien
actattgacccagcgatgggggcttcgacatgggctttagggagtcataagtggagtccgtaaagaggtatctttactataaaagctattgtgtaagctagtcatattaagttgttggctcaggagtttgatagttcttgggcagtgagagtgagtagtagaatgtttagtgagcctagggtgttgtgagtgtaaattag

SEQ ID NO: 1850 - DNA, 562 bp, Homo sapien
  misc_feature (1)...(562): n = A,T,C or G
acttcagtaagagatgggggcaaaagagttggtagtggtgcacaaaaaacaagaacaggaagactcaaaaagccttttgtaaaggtggaagatatgagccaactttataggccattttatcttcnnctgaccaatatgccttttataaattattctattcagaagccctgcagtccatttgatgtagacaagccatctagtatgcaaaagcaaactcaggttaaactaagaatccaaacagatggcgataagtatggtggaacctcaattcaactccagttgaaagagaagaagaaaaanggatattgtgaatgttgcttgcccanatatgaanatctanaaactcaccttctangtgagcancacanaaactttgcacagagnaaccantatcaagtngntgatgatattgnatctaagntagtttttgactttgtggaatatgaaaaggacacacctaaaaagaaaagaataaaatacagtgntggatccctttctcctgtttctgcaagtgtcctgaaaaagactgaacaaaaaggaaaaagtggaattgcaacatatt

SEQ ID NO: 1851 - DNA, 207 bp, Homo sapien
gaaagttcccttccctgcccacacacaacgaaaacatggtggccaaagtggatgaggtgaagtccacaatcaagttccaaatgaagaaggtgttatgtctggctgtagctgttggtcacgtgaagatgacagacgatgagcttgtgtataacattcacctggctgtcaacttcttggtgtcattgctcaagaaaaactggcagaatg

SEQ ID NO: 1852 - DNA, 260 bp, Homo sapien
actttttggtgggagtggggtgggacatggaaggggtagggtcagatggagacagcccagaaggaaagccagctctatccacccctacagcttccccggccaaccaggttcaaagcccatcagttatatctcactgtgccgctgtcaatgcatgttgtggctgctggtaaagagttggtttggcctccacagagagaggatgggaaactagggtagaagctacaagggctaagaacttgatgctttttctccagtacctg

SEQ ID NO: 1853 - DNA, 176 bp, Homo sapien
  misc_feature (1)...(176): n = A,T,C or G
actccttacactannncctcatcacccaactaaaaatattaaacacaaactaccacctacctccctcaccaaagcccataaaaataaaaaattataacaaaccctgagaaccaaaatgaacgaaaatctgttcgcttcattcattgcccccacaatcctaggcctacccgccgcag

SEQ ID NO: 1854 - DNA, 371 bp, Homo sapien
  misc_feature (1)...(371): n = A,T,C or G
ccagaaccagggtgacatcaagctctgtgagggtttcaatgaggtgctgaaacagtgccgacttgcaaacggattggcctaatgaagaagttcaacctggagagatggaaaatcagctctcataactaagttaatttagtataaaaatagaattgatagtgagggtataaagtgtaaccatcagttaaacctctcctgtcattcctggcttccttgcttcagaattgaaatggaagtgggggtgtccctactctgtagaatctgggactgggcaaatgtttgtgtggcctccttaaactagctgttatgttatgattttattctttgtgagttaattagaataaagtcattttcttccnaaaaaaaaaaaa

SEQ ID NO: 1855 - DNA, 302 bp, Homo sapien
  misc_feature (1)...(302): n = A,T,C or G
ttttcatttcaggannggacgcttctcttgtgagccagctggaggtcttacctctttgactgaaccacccaagggacctggatttggtgtgtcagggccagggaggcatggccccacttgtatccagaagttcccaggggtgattgtgatggnggttgggactggaggttgtataaggtgttcttggaaggaaggggcaggagttggaattagttggtccctactgtcccccatgaggttgtgaacccctncccccaacttttcatgtttcttaaaggccattttggttttttaaaatctgt

SEQ ID NO: 1856 - DNA, 234 bp, Homo sapien
acagagagggcaggaagtttccatccagtctggtttaggtgctcttcttttcttcacccagtaaattcacggtagctttcttcgcttctttagtgatggcatctgcagtctctttggccttgtctttaaggtccttgaccacactgtccatctgggactcgtgcttcaggaagaaaggacggatgatgcgcttgtagagcagttcagccccattagaagggctcggggccatgc

SEQ ID NO: 1857 - DNA, 570 bp, Homo sapien
ccaaattccagtgtgcagaccacaacctcaaaacaaaaaaggttggtcatgcagcattaaactttgacaaggccactgacatcgtgacaggtctgaaacagaaaacctcctttgggagaccaatgtgggacaatgagttttctacaatagctacctcccaccccaagtctgtagtgggagttttcttatgtggccctcggactttggcaaagagcctgcgcaaatgctgtcaccgatattccagtctggatcctagaaaggttcaattctacttcaacaaagaaaatttttgagttataggaataaggacggtaatctgcattttgtctctttgtatcttcagtaatttacttggtctcgtcaggtttgagcagtcactttaggataagaatgtgcctctcaagccttgactccctggtattctttttttgattgcattcaacttcgttacttgagcttcagcaacttaagaacttctgaagttcttaaagttctgaagttcttaaagcccatggatcctttctcagaaaaataactgtaaatctttctggacagccatgactgtagcaa

SEQ ID NO: 1858 - DNA, 266 bp, Homo sapien
actggaaaaacgaccttcgtgaaacgtcatttgactggtgaatttgagaagaagtatgcagccaccttgggtgttgaggttcatcccctagtgttccacaccaacagaggacctattaagttcaatgtatgggacacagccggccaggagaaattcggtggactgagagatggctattatatccaagcccagtgtgccatcataatgtttgatgtaacatcgagagttacttacaagaatgtgcctaactggcatagagatctggt

SEQ ID NO: 1859 - DNA, 495 bp, Homo sapien
  misc_feature (1)...(495): n = A,T,C or G
acatacgtctgccangggtaacctggccactgtccctgtccttctacagaacctgagggcaaagatggtggctgtgtctctccccggtaatgtcactgtttttattccttccatctagcagctggcctaatcactctgagtcacaggtgtgggatggagagtggggagaggcacttaatctgtaacccccaaggaggaaataactaagagattcttctaggggtagctggtggttgtgccttttgttggctgttccctttgccttaaacctgaagatgtctcctcaagcctgtgggcagcatgcccagattcccagaccttaagacactgtgagagttgtctctgttggtccactgtgtttagttgcaaggatttttccatgtgtggtggtgttttttgttactgttttaaagggtgcccatttgtgatcagcattgtgacttggagataataaaatttagactataaaaaaaaacctcgntccccactanggta

SEQ ID NO: 1860 - DNA, 489 bp, Homo sapien
  misc_feature (1)...(489): n = A,T,C or G
acagattgggcggaatgtggagaaggttggccacagtccagagccaggagcccatggaacaacttggaaggtgactcaggtgaggctgtcaatgagggaatcccgcatgctggtggcaatggtgctaggctgggcttcattcagcttgaagacactctccaccactgacagctctgtgctggttgtgtccaggccacagaaggcacaccagtcattcaccaccatcccagcagcaatcacctcactgcctcggttcacagtccccgccacaagggggacttgaagaagagaggacagctcatcctggtcttcaattgaagtcttgggatgcaccagccctccctgattgctgaagacacagtagcttcctactagcacctggtcggccactgtctgtctgaagacttccaccttgagcacatctgccagaatttcttctgtctccctgtccaagtctgggtggaccaangccacgtagtcattgcaggt

SEQ ID NO: 1861 - DNA, 443 bp, Homo sapien
accaccttaattcctcagaatgcaattgtgtatgataccaagctacaacttgataagaaattgtgattttcttcttttattttcattctccaattttaaaaacatctattgcacatctaccatgtaggaggaatgtgctcacactggagaacagaaaaaagttttcaatcttcattacctgcccatgaggggcttagtctagctgggaaggaaagaaagaaccaatcaaaaggagtttagtgccacaggagcacagcaaggagagaccaaactgcccaggattcaaggaggatcatccagagatctgtcagggggtttcctctgggtccccttcgtttgtctagaaggccacacaaataaagaaattagatttttaaatacaacacagatcgaccttaggtgtgcccaaaacactactgtatataaacaagaactggtacctc

SEQ ID NO: 1862 - DNA, 106 bp, Homo sapien
acaaggaggggaaggaagctgaacaggggtggctcgtgagctaaggaccaaaggtcgacctgtctggatgtttggagcaggactactggagagggcattaggcggt

SEQ ID NO: 1863 - DNA, 454 bp, Homo sapien
acaaaagggaagggcgattcacactttacaaggtgagaggggctctgattgtaaggaaagctcgggcaaggctagacttttgcacgtccttttgactgtcacaaaatcaaaacattacttttttaggattgaaaaaacactagtgagaactcaatcttgaataacatttagaaagaatctcgctatacttgagactagatgacaaataaaaccaagctatttttttctttttaaacattaactaggctgtataaagaacatttattccttcaaaagaaaaaaatttacttctggttgaaattacaatttacaatatacaacactatatgctacgaccataaaaggtgagaatatacactgaatgcacagggctggctaattctcttttcttaccaaaaaacgtgtttatgttgattcaaacttctccacatttacattacaggtatacaaatgt

SEQ ID NO: 1864 - DNA, 454 bp, Homo sapien
acccatgcaggactcactacattgtataataactatgatctatagtgataaaaatatagaagtatctttgattttaatcctaaaagcagggggaaaaagtcaccttatcttaatgttaacaaaatcaagagctacccctaatatatcgatcaaaccacttcttatggctttgcttatagttgctcatggtcctttcaaaatgatgtggtagctaccttcttttctgacaaaggattattttcaacagagcaattatttctgagcccaaaataaaccacattaaataagaagaaaatcttcagtgtagaaagaaaaaggctcattgccgtgaaatagcagcaggcatcgagctctgtgagcttttcacacatcctcaatcaacccagctcaaggcgttactgagttcatctagtaagagcactgagcggtctctagtgctggaggggaattactc

SEQ ID NO: 1865 - DNA, 389 bp, Homo sapien
acacaatgtgtagctcatatgaaaacctcatgacaagtcattgagttctgtaaactgccatacaacttacatgtgtaatattaattgcacaaagtatatcaagacatattgaagaaacacaaaattaagtgctattttaacggttcatctttcagtatgtgaatacgtatacaaatttaactgcacagttttgttgaaaataagtttcaacaataagacttcagttgttaaaattaacccaaaatataactttaattaaattacatcactacaatattaatctcttatcttgtttacatttttggtgttttgggacttttgttaaaaaaaaatccaagttctagaattgcaaaaacttcattgttgccactgagagagcaacatatagt

SEQ ID NO: 1866 - DNA, 303 bp, Homo sapien
acagagagaggaagaagctattcagttggatggattaaatgcatcacaaataagagaacttagagagaagtcggaaaagtttgccttccaagccgaagttaacagaatgatgaaacttatcatcaattcattgtataaaaataagagattttcctgagagaactgatttcaaatgcttctgatgctttagataagataaggctaatatcactgactgatgaaaatgctctttctggaaatgaggaactaacagtcaaaattaagtgtgataaggagaagaacctgctgcatgtcacagacacc

SEQ ID NO: 1867 - DNA, 477 bp, Homo sapien
acttggcccgggtcacgcgtgggtcctctccgggctcgggagtagcatcctcaggagtagtgtagcgagcaaattctggaaagtagtcctcaatcttcgatttcccagcaaggactttctcagcgagcagatcttgcttgttgaggaacaggatcacagagatggtgcgcagccatctgttgttccagatgctcttgaagaggttcagagcctcctgcaggcggttggtctggttgtcctcccggatgaccatgttgcagctgctgctggccaccacgaagatgatggcagtcacatcgttgaagcactggatccacttgcggcgttcatcgcgctggccacccacgtcaaacatgtggaagttgactttgtccacctggaacttggtctcaaagattccagaagtcaggacacggcagcgaagcaggtcctgatcgctcggcacatagtcagcctgcttgatcacgtcgatcttgt

SEQ ID NO: 1868 - DNA, 484 bp, Homo sapien
actcccagtagcaccaccacctgagccaagatcactgacagcagaagaagtgaaacgactagaagaacaagaagaagatacatttagagaactgaggattttcttaagaaatgttacacataggcttgctattgacaagcgattccgagtgtttactaagcctgttgaccctgatgaggttcctgattatgtcactgtaataaagcaaccaatggacctttcatctgtaatcagtaaaattgatctacacaagtatctgactgtgaaagactatttgagagatattgatctaatctgtagtaatgccttagaatacaatccagatagagatcctggagatcgtcttattaggcatagagcctgtgctttaagagatactgcctatgccataattaaagaagaacttgatgaagactttgagcagctctgtgaagaaattcaggaatctagaaagaaaagaggttgtagctcctccaaatatgcc

SEQ ID NO: 1869 - DNA, 461 bp, Homo sapien
ggaatggaatcacccggaatggaatggaatagaatggaatggaatggaatggaatggaatcaacgcgagtgcaggggaatgtaatggaacggaatgcaatggaatggaatcatccgtaatggaatggaaaggaatggaatggaatggaatggaatggaatcgaatggaatggaatggaattaacccgaatagaatggaatggaatgggatggaacggaacggaacggaacggaacggaatggaatggaatggaatggaatggaacggaaaggaatggaatggaatggaatggaatggaatgcaatggaatggaatcaacgcgagtgcaggggaatggaatggaatggaatgcaatggaatggaatcttccggaatggaatggaatggagtggaatggaatggaatggaatcaacgcgagtgcaggggaatggaatggaatggaatgcaatggaatggaatc

SEQ ID NO: 1870 - DNA, 222 bp, Homo sapien
acagctacagcttcatcaaccttagaacggagtgactctggagactcgagcatatgaagaagttctgaattatcaatctccaacaacatgccagtgattttaccagcaagagtagggtgcatggcttgaataagaggaaacagccgttcacccaacatttgcttttgctcttgaggaggggcagatgccaacatggaagcagtcaaaggttcctgaccttgt

SEQ ID NO: 1871 - DNA, 114 bp, Homo sapien
tgcacaaccactacacgcagaagagcctctccctgtctccgggtaaatgagtgcgacggccggcaagcccccgctccccgggctctcgcggtcgcacgaggatgcttggcacgt

SEQ ID NO: 1872 - DNA, 450 bp, Homo sapien
  misc_feature (1)...(450): n = A,T,C or G
accagccactacccctatgcagaggaagtgatgcagatgtgtgaccgctatgggattgtggtcatcgatgagtgtcccggcgtgggcctggcgctgccgcagctcttcaacaacgtttctctgcatcaccacatgcaggtgatggaagaagtggtgcgtagggacaagaaccaccccgcggtcgtgatgtggtctgtggccaacgagcctgcgtcccacctagaatctgctggctactacttgaagctccgtatgtggatgtgatctgtttgaacagctactactcttggtatcacgactacgggcacctggagttgattcagctgcagctggccacccagtttgagaactggtataagaagtatnagaagcccattattcagagcgagtatggagcagaaacgattgcagggtttcaccaggatccacctctgatgttcactgaagagt

SEQ ID NO: 1873 - DNA, 498 bp, Homo sapien
ctgccaggcccagcagccaccacagcgcctgcttcctcggccctgaaatcatgcccctaggtctcctgtggctgggcctagccctgttgggggctctgcatgcccaggcccaggactccacctcagacctgatcccagccccacctctgagcaaggtccctctgcagcagaacttccaggacaaccaattccaggggaagtggtatgtggtaggcctggcagggaatgcaattctcagagaagacaaagacccgcaaaagatgtatgccaccatctatgagctgaaagaagacaagagctacaatgtcacctccgtcctgtttaggaaaaagaagtgtgactactggatcaggacttttgttccaggttgccagcccggcgagttcacgctgggcaacattaagagttaccctggattaacgagttacctcgtccgagtggtgagcaccaactacaaccagcatgctatggtgttcttcaagaaagtttctcaaaaca

SEQ ID NO: 1874 - DNA, 145 bp, Homo sapien
accaggctcctttctgtgtattttactctcgtggttgcattagatcctcacgataagagaaggatactgttactgttctcattctacagaggaggaaactaagacacagagcttttctttgagatctgaaagagttaagatttgt

SEQ ID NO: 1875 - DNA, 217 bp, Homo sapien
accccaccctctatgaagacagaatcactctctgccattcattctgcctgatgctaacaacacgcagctgatttagggagtgtcccagcctagctggatcaagggaaattccaggagccctggggcaggccctggcccccagtgccaagcctcagagtaagcagacattgggaaagttgccaaccacttggtagaccactaggttctctgttttccc

SEQ ID NO: 1876 - DNA, 191 bp, Homo sapien
  misc_feature (1)...(191): n = A,T,C or G
tgaatttgccccttcngccaggtggatgtttaccgtgtgttatataacttcctggctccttcactgaacatgcctagtccaacattttttcccagtgagtcacatcctgggatccanngtataaatccaatatcatgtcttgngcataattcttccaaaggatcttattttgtgaactatatcagtagtgt

SEQ ID NO: 1877 - DNA, 608 bp, Homo sapien
  misc_feature (1)...(608): n = A,T,C or G
accaggtattccataaaactctgtagaggtcatttacatttcgtaaattctgtaattacaccttactgtatcatgccctagtagtttcacaaacttagatattcacaaaaatgttttggaatatattccttgggaatgtgaagggtctcctatattacattaaacaaaaaaccatgcagttacttagagctcatagagctttctcaaaatcaactactgatcataacagcccaattaaaaactcaaacactttatattacagatatagagtttataatccagcaatgccaatataggtaatctgatagcccctatttgcaaagtgattaacaattatacaataacttctatctgctttggctcagatgtttaaatacttaaacagtttggaaagacttttttctgtgtgtatttcgttttgtttttttgtctgtgtgggcatgagcataggggaggttatactgaaaaggagaatgaagaggtcaggaattaaagagccactaaaatttgacttaacatttntccnataaaatacatgtnngagaatatggcttaaagacaaagagggggagagcctcttaattgntcatacnattttacttcaccct

SEQ ID NO: 1878 - DNA, 227 bp, Homo sapien
actcattttatgtatgttacccttcagtaagttctccccattttagttttctaggactgaaaggattcttttctacattatacatgtgtgttgtcatatttggcttttgctatatactttaacttcattgttaaatttttgtattgtatagtttctttggtgtatcttaaaacctatttttgaaaaacaaacttggcttgataatcatttgggcagcttgggtaagt

SEQ ID NO: 1879 - DNA, 399 bp, Homo sapien
acattctgcacttgacatcacagagcgaactgagattagcagtcctatgttctacaattacttaatgcttagataacatttgtgcaacttgtggtagagctagatttctgtctttctatatgcacatgaggtccatagcctatataataaaactggcaaataatgcatattacatgtaaaattacaaatgcataattgacaatgtaataagcaagtagacaaatgccatgatacagaagagaattattaaataaagcactgacattgtttgatacagtgaaaaaacactgcaattccacttttaaaatttgaagctatttacgtttatctactgatcaatatgatcagctgaatttaatggaaaaaaaatccaagaccagcagttcctcacatttgagt

SEQ ID NO: 1880 - DNA, 52 bp, Homo sapien
  misc_feature (1)...(52): n = A,T,C or G
attaaacgaattgaaccnnnccaaccacaagacgataaagggaaacagggcg

SEQ ID NO: 1881 - DNA, 226 bp, Homo sapien
acgagctgttcccaaccctgtaatcaacccctaccagccagcacctccttcaggttacttcatggcagctatcccacagactcagaaccgtgctgcatactatcctcctagccaaattgctcaactaagaccaagtcctcgctggactgctcagggtgccagacctcatccattccaaaatatgcccggtgctatccgcccagctgctcctagaccaccatttagt

SEQ ID NO: 1882 - DNA, 144 bp, Homo sapien
  misc_feature (1)...(144): n = A,T,C or G
acatgttgnngctgccgctccgggagtcatagcgcagccagatcccgaagttcttcacccgcaggggggacttctcaaacacctgcccacagtagacaatctcccctgaagacttcttcatcttctttaactgagatacaaagt

SEQ ID NO: 1883 - DNA, 170 bp, Homo sapien
  misc_feature (1)...(170): n = A,T,C or G
acacacatacaggcctaactgagaccgctcagaatttagaaatgtaactagtggcatacagaagagaaattgtgtctatgacaaagaaataaaaaattcttggtaattttaagcatagcaaactaggttctttaattaaaaagtttttttttgtnnttttttttggtttg

SEQ ID NO: 1884 - DNA, 353 bp, Homo sapien
  misc_feature (1)...(353): n = A,T,C or G
actgcgcaaacagagaaagtcagtgttatccaggactttgtgaaaatgtgcctggaagccaacatcccacttgagaaggctgatcacccagcagtccgtgctttcctatctcgccatgtgaagaatggaggctccatacctaagtcagaccagctacggagggcatatcttcctgatggatatgagaatgagaatcaactcctcaactcacaagattgttgactaggaggttaccaccattgtgatcaagataaatgtggagtattaaagttatgtgttgattgtgtggntcatttttgtatttatttcattnaaaatcatgtgacgcanaatanttttgcaatgtgtatata

SEQ ID NO: 1885 - DNA, 432 bp, Homo sapien
acttgaatcttcttttttttttttttacttttgagacagggtcttgctcttgctatgttgcccaggttggagtgcagtggcactatctcagctcactgcagcctagacctccccaggctcaggtgatccccccacctcagcctcccaagtagctggaattacaggtatgtgtcaccacacccggctaatttttgcagtttttgtagagtttggcttgctgagaggtagtggagcggggcagagcggtagcctcaaggatagatgtggaagatagtatagcatagcctgcctttgctggtgtgtggcgattaggcctggtggaactgccatcaataaatcaagcgtgatcagggtgaggaataggaaagaaggaaatatggggaaatggggtgaatatcaggtggatcagagagatacagtcatgggggtcag

SEQ ID NO: 1886 - DNA, 446 bp, Homo sapien
acacagcttaaccacggccaggagcaagaattcgagttaaacgaattgaaccagtccaaccacaagacgataaagggaaacagggcgtggggatttccagtttttccttttacattacaaagtttccaacacaagaagccaacaataccccagtgctgcaccaagttacttcccactgtttcccaaggcacagttaattaataatcagtagtccaagttctaagaacatttcctggaaaacaaggacgcacctcccgtggctctatgcatggcctgccactgatgaatcaaattcttaagaacctacgaccgtctgatacccttgaggagagcaccctcatagaatctccagcatcaggcctcagttttcccatctgtaaaagacagccatgcaaagtgggagatccgctaggcttccagatcgaagtcatcgcgctcctcattgt

SEQ ID NO: 1887 - DNA, 306 bp, Homo sapien
  misc_feature (1)...(306): n = A,T,C or G
taatgagacaaagcctcatggagtttaagggaccagtattatatatattttcaaggacaagattaatgcagggaaattctaggacagagaacagctaactcaaacttttcccctttgcttccctctcaaattgcttacatagagaactgtgccaatacnaaagaaataaaggatatgctggcgtaactgaagaacaggcaactaaaaangttttggaagtaaacaaatgatatatgtataaaattccacatgctgaaagcaacttgggaggagcaggaacttcttatacattttgtagtacctgcc

SEQ ID NO: 1888 - DNA, 530 bp, Homo sapien
acaacatgacttaaaactttttttttttctattaaaacttaaaggggaacaaaacttgaaaaagccctgttcttcagaaggtgagtgggttgagggaggcagtaatatgaagtgactgctgtgtattttaactaccagattttttatatttgccactgttaaatagttggaaaggggaaattctgattaagcgaaagtggtatcatcctaggtaagcttatttcagaacaagtctaatatttcagattctttcttttcgactttatactctgagttattacttactgtaagtggtgtatatgaaacctccatgcattttccagtatggatctgctaatatgcacagtaaatccatgtctttgtttgtttttctattaaaaagcaatcaagaaagataatgtgaaaaagaaaggaatttagaggtagggaaaagatgaatgtcagacatttgaagaactatagtaaaatgataaacactaaatatacttgagaaaactttcttaatatgccaatgaggtaggcctgatctt

SEQ ID NO: 1889 - DNA, 337 bp, Homo sapien
agaatacaacgatggattttaaatactgtttgtggaatgtgtttaaaggattgattctagaacctttgtatatttgatagtatttctaactttcatttctttactgtttgcagttaatgttcatgttctgctatgcaatcgtttatatgcacgtttctttaatttttttagattttcctggatgtatagtttaaacaacaaaaagtctatttaaaactgtagcagtagtttacagttctagcaaagaggaaagttgtggggttaaactttgtattttctttcttatagaggcttctaaaaaggtatttttatatgttctttttaacaaatattgtgt

SEQ ID NO: 1890 - DNA, 340 bp, Homo sapien
accaggaaatgcaaaggaagaacatcttaatatgtttattcagaatctcctgtgggaaaagaatgtgagaaacaaggacaatcactgcatggaggtcataaggctgaagggattggtgtcaatcaaagacaaatcacaacaagtgattgtccagggtgtccatgagctctatgatctggaggagactccagtgagctggaaggatgacactgagagaacaaatcgattggtcctccttggcagaaatttagataaggatatccttaaacagctgtttatagctactgtgacagaaacagaaaagcagtggacaacacatttcaaagaagatcaagtttgt

SEQ ID NO: 1891 - DNA, 350 bp, Homo sapien
  misc_feature (1)...(350): n = A,T,C or G
accagcagcttccacgaacagcccccaaactcctcatctatggnnacaggaaccggccctcaggggtccctgaccgattctctggctccaagtctgacacctcagcctccctggccatcactgggctccaggctgaggatgaggctgattattactgccagtcctatgacagtagcctgagtggttatgtcttcggaactgggaccaaggtcaccgtcctaggtcagcccaaggccaaccccactgtcactctgttcccgccctcctctgaggagctccaagccaacaaggccacactagtgtgtctgatcagtgacttctacccgggagctgtgacagtggcctggaag

SEQ ID NO: 1892 - DNA, 464 bp, Homo sapien
acatgagaaggaacttccaggtgttactgtaattcctcaacgtattgtttcgacagcactaatttaatgccgatatactctagatgaagttttacattgttgagctattgctgttctcttgggaactgaactcactttcctcctgaggctttggatttgacattgcatttgaccttttatgtagtaattgacatgtgccagggcaatgatgaatgagaatctacccccagatccaagcatcctgagcaactcttgattatccatattgagtcaaatggtaggcatttcctatcacctgtttccattcaacaagagcactacattcatttagctaaacggattccaaagagtagaattgcattgaccacgactaatttcaaaatgctttttattattattattttttagacagtctcactttgtcgcccaggccggagtgcagtggtgcgatctcagatcagtgt

SEQ ID NO: 1893 - DNA, 335 bp, Homo sapien
cttctgcagtcatcgagaagtcctggatcttttgtggttacaccagcatcatgtggcaagcagaggcgacttccggaagagacaggcaggcaccgtgaggaaggtggctgtgctctcccaggtgtctcagagacagatgccttatttaaaatcagcacgacatgtgtgagatcttctgtttcctaccccaaatcctgaaaccctgcagacactggctgactgggagaggtggggtctgtaagttgtcccctagtttgctaaaaaaatctaaaataatatttattatatgagttaggagagagagaatgggtccgcgtggcctcctctgcagatgt

SEQ ID NO: 1894 - DNA, 199 bp, Homo sapien
actacaaacctacaagatccaggagtgttaggttgccctcggacatgccttcacgccattctaaacatcttggagaaaggaacggaagggagaacaggcccagtggcggtgcgagaatctcctcagctggctgagctatgttaccaggtcatatatcagttatgtgcatgctctgatacatctggtcctactatgaggt

SEQ ID NO: 1895 - DNA, 222 bp, Homo sapien
acagctacagcttcatcaaccttagaacggagtgactctggagactcgagcatatgaagaagttctgaattatcaatctccaacaacatgccagtgattttaccggcaagagtagggtgcatggcttgaataagaggaaacagccgttcacccaacatttgcttttgctcttgaggaggggcagatgccaacatggaagcagtcaaaggttcctgaccttgt

SEQ ID NO: 1896 - DNA, 207 bp, Homo sapien
actaaagcattcatggaggctcttcaggctggtgcagacatctccatgattgggcagtttggtgttggcttttattctgcctacttggtggcagagaaagtggttgtgatcacaaagcacaacgatgatgaacagtatgcttgggagtcttctgctggaggttccttcactgtgcgtgctgaccatggtgagcccattggcaggggt

SEQ ID NO: 1897 - DNA, 187 bp, Homo sapien
acgcttatcctgactgagggagattcagccaaaactttggctgtttcaggccttggtgtggttgggagagacaaatatggggttttccctcttagaggaaaaatactcaatgttcgagaagcttctcataagcagatcatggaaaatgctgagattaacaatatcatcaagattgtgggtcttcagt

SEQ ID NO: 1898 - DNA, 544 bp, Homo sapien
gcggcggcggcgttgacaatgagttttcttggaggctttttggtccaatttgtgagatcgatattgttcttaatgatggggaaaccaggaaaatggcagaaatgaaaactgaagatggcaagtagaaaaacactatctcttctatgacggagaatccgtttcaggaaaggtaaacctagcctttaagcaacctggaaagaggctagaacaccaaggaattagaattgaatttgtaggtcaaattgaacttttcaatgacaagagtaatactcatgaatttgtaaacctagtgaaagaactagccttacctggagaactgactcagagcagaagttatgattttgaatttatgcaagttgaaaagccatatgaatcttacatcggtgccaatgtccgcttgaggtattttcttaaagtgacaatagtgagaagactgacagatttggtaaaagagtatgatcttattgttcaccagcttgccacctatcctgatgttaacaactctattaagatggaagtgggcattgaagattgtctacatata

SEQ ID NO: 1899 - DNA, 512 bp, Homo sapien
acaagatgtgttactatcgctttggacaggtttacacagaagccaagcgtcctccaggctttgaccgtgtccgaaatgctgagattgggaataaagactttgagcttgatgtcctggaggaagcatataccacagaacattggctggtcaggatatacaaggtaaaggacctggataatcgaggcttgtcaaggacataaatgtcacgtccagctctgatatgcttcgcactgagcacatcacatttaggacgttgaagatttttttttttttttaatatgcagtttgtaagaacaaaactggatggcatcagaattgtctggaagttttgtcttgggcagtatgggctgggccaaatgaaatgatttttataattctaaacaggttaccaaatgaaatgtcatggctttactttggtcaattaaaggggggaatttttttaaaaaatgtgccttatttgttttgacttataactgatttgagggaggcaaaagctatgctaggctgccaga

SEQ ID NO: 1900 - DNA, 553 bp, Homo sapien
  misc_feature (1)...(553): n = A,T,C or G
taggtattcctgatgacagtctgcctctatcttacagtaagttgtttttcgaattctatgggcctattatctaatagataacttagccattttgatatttgttaccaaagcctgcttaacccataaagttttctggttcctcttgttctctgtagtgatgtttctagatagatgcccactgatatatgccccttttttctcagatagatgcccactgatctgcccagggtcagacgaatgcttgtcagttgtagctttccaggattctgctccaatgaggaggaaacatcctgccttacccctgttttagcctgggaaccagtaattgtgaactcaccagggttaacatgaagagggcatgagagcttattccataaggaattgtctgagacatttggttaccttttcttagtttgnccattagcaaccgtaactaaaatagttttggctgtttttgggataattagctaattgaatgattttttcgnntcaggagcaagnttgttgctatataccattgaaaaagccttcagagctgagaggntagttgata

SEQ ID NO: 1901 - DNA, 195 bp, Homo sapien
actgactggatatattttatgggcatgtagtgttgttaagtggtaaaatttaaagacatttaacctaaatgttccattttctcttaagaaaaaaaaggaagacgttttaataggaaaagaaaaacaagaagcagtagcagctaggtaatttaaactgagattaaaaaataaacatacacaaaaaatacaaaaagt

SEQ ID NO: 1902 - DNA, 288 bp, Homo sapien
  misc_feature (1)...(288): n = A,T,C or G
acaattacccaccactggatttgactcagagaggacccccagagggtgtctccatcttccctatttatnntcagcccttgagggcttcattgtagatcaaagccaaggcccccaggaaggtgacatactcctggaagttcacctcctggtccttgttccggtccaagtcttccatcagccttgcaatttcagcatcctgcagcttcgagccaatggtgagctccttctggatcagctccttcnnctccttnttgctcagggtgtgcttgtnaccctccctgccggagt

SEQ ID NO: 1903 - DNA, 220 bp, Homo sapien
  misc_feature (1)...(220): n = A,T,C or G
acaattacccannactggatttgactcagagaggacccccagagggtgtctccatcttccctatttattttcagcccttgagggcttcattgtagatcaaagccaaggcccccaggaaggtgacatactcctggaagttcacctcctggtccttgttccggtccaagtcttccatcagccttgcaatttcagcatcctgcagcttcgagccaatacctcg

SEQ ID NO: 1904 - DNA, 371 bp, Homo sapien
gcaggggcccttagagtcttggttgccaaacagatttgcagatcaaggagaacccaggagtttcaaagaagcgctagtaaggtctctgagatccttgcactagctacatcctcagggtaggaggaagatgacttccagaagcatgcggctgctcctattgctgagctgcctggccaaaacaggagtcctgggtgatatcatcatgagacccagctgtgctcctggatggttttaccacaagtccaattgctatggttactccaggaagctgaggaactggtctgatgccgagctcgagtgtcagtcttacggaaacggagcccacctggcatctatcctgagtttaaaggaagccagcaccatagcagagt

SEQ ID NO: 1905 - DNA, 361 bp, Homo sapien
acactggtttgctactcatggcaagaaacagacaaagccccatgaaaaataaaacaaaacaaaagtcatttcaaacaaagctgttgttttgaaaactcttgctttcttttggtgtccattttgtgttctattttaaagaatctttcatttatattggtgttattgtagtgaagagaatgtgataggctgatctgtaatggtttctgtcaggagcttagcaaatgcctctgcccctcttcccctacccctgtccttcctcagttcccagctgggattgctatgcactgggcagacccgtcactgtctcccctgaacccccacacagtggcttcccttagaaccagtctttgtacctcggccg

SEQ ID NO: 1906 - DNA, 472 bp, Homo sapien
  misc_feature (1)...(472): n = A,T,C or G
cttttttttttttttttttttttttttttgggcaaaattttttattatgaagatacagatctaagaacagaaggataattatgtgctagcttatatatagttccttgtaaaaataatgatacatgaaaaattagtanaaaatgaaaatctgcagttatctgatatctgaaaatgttaagcaatttcccctgcatcttagttctaatcacttttgcagaataatcaagcatatttgggtgaagagagtatttaatgattccatttttattaatagngtagngngcccttcanagcttggcgtagtctttaanaatcatntgaagtttctggctcagcatgatgttccctntggccttcagcctgccactaaanaatgccttntgagggtcaagcttgcccaggaccacctccatgaaatcttcatctgaaagtatgattgttgtatcagcagcaccttttgcagggccttggt

SEQ ID NO: 1907 - DNA, 309 bp, Homo sapien
actaactacagatagaagaaaaacagtattaacatgtgtattacagcactgcagttcactttctggatttgtgacacacaaacacatcatgcattctaagaagttaattttattagtgtcactagtgatgttaattaaaaaacttatagcaagtgctcaaaactttctaaatattgtaatcactatgttttaaagacagagtggactgttacaaatgattttgcaaaatacaaaaatagatatacttccactgaatgctttaatcatttttccgggcactctcatcttttggttcttcctcatctgagt

SEQ ID NO: 1908 - DNA, 283 bp, Homo sapien
actgtatttatatttgtgggtggcagctctcaaattatttatccatagtccagatttgttttgttgcatttgctcttaaaatgcattgttgtatactccatcacagatgtgtcaaatactcctgctgtcttttgaggatgtagcaaaacctaaacctgctactttaaaccaaagtcctttttttattattgtaaagctgacattttactctgatttaagcacctgaagtgtattttgactaatttatattctgagctaaaattaagaacctcaggatttgtgt

SEQ ID NO: 1909 - DNA, 429 bp, Homo sapien
  misc_feature (1)...(429): n = A,T,C or G
accaccacacccggccaatttttttatttttagtagagtgttgccacgttggccagtctggtctcaaactcctgacctcaagtgatccacctgccttggcctcccaaaaaggactgggattacaggcatgacccaccatgcctggcccaatgttaacacattttgaaaaataagacaatcatggaaataagtgatgacactanngaattattcttttaggtgtgataatgatgacttgcagttatgtttttaaaagacttcatacctttagagatatatatttaaatacttacagatgaaaagacatgatgtctgctgtttgcttcaaaataatcttgggtggggaagagtggggctacaggtgaaatangacagacctggagttgactattttggggactggggaatggctacatgggggttcattgt

SEQ ID NO: 1910 - DNA, 257 bp, Homo sapien
actcagaggcacttccctcctaagtcaaagaccatcctcactgactatgtgccaacgcctcgtttcaggcttgtgactcaacaaagggcttttccattgatagaagcagtttgggatttgtagttgcgacttcttcgatagttacctgcacgtccattgctggcaactgacttgtcattaaaacctggctctttggttaagggagctacgctgtggtttattcttaagttacgtggataaactaacctctaaaaaaa

SEQ ID NO: 1911 - DNA, 274 bp, Homo sapien
acctcaccatccacagtgaccatgagggtggcaatgtaagtgcccataccagccatttggtgggcagtgccctttccgacccttacctgtcctttgcagcagccatgaacgggctggcagggcctctccatggactggcaaatcaggaagtgcttgtctggctaacacagctgcagaaggaagttggcaaagatgtgtcagatgagaagttacgagactacatctggaacacactcaactcaggacgggttgttccaggctatggccatgcagt

SEQ ID NO: 1912 - DNA, 197 bp, Homo sapien
acgagtaagggtttgatctacaaaagagctcacatggacgcactgagaacgcctgccagcttccccatgccctcacttggtttgtgttttaggttaagtagtcagtgcccacatcacttcactgtctcaagactgagcacttcactaaatggtagattttactgttaaagaccctacaataagattgttttatctgt

SEQ ID NO: 1913 - DNA, 302 bp, Homo sapien
acaacagatcaagaagtatggcagtgacaactcgtttgacatggttgcacgaaaagatcctgcaaaatcattttggagggaagcggcttagccttctctataagggtagtgtccatggattccgtaatggagttttgcttgacagatgttgtaatcaagggcctactctaacagtgatttatagtgaagatcatattattggagcatatgcagaagagagttaccaggaaggaaagtatgcttccatcatcctttttgcacttcaagatactaaaatttcagaatggaaactaggactatgt

SEQ ID NO: 1914 - DNA, 322 bp, Homo sapien
acttctgcaggtgtttctctgtggcagggtaaaccacggtcgtctttacatcattcagttgtcttggagggaacaagtgataggtgctgtagatatcattggagaactgcaattggagctcagggctgcccgtcaggagctgagccacctgttccacctgaaatggcgtcttctccaggatcacaacggcatcctctccatccccatccccagaggcctcattcaccttcccgtgtaggaaaatgattttgtcccgcgcagactccctcagcaccttctgcagtctgaagccggagaacggtaagcggacaggagcacaggt

SEQ ID NO: 1915 - DNA, 333 bp, Homo sapien
accatgcactgagtgactgtggggatcatgttgttataatgaacacaagacacattgcattttctggaaacaaatgggaacaaaaagtatactcttcgcatactggctacccaggtggatttagacaagtaacagctgctcagcttcacctgagggatccagtggcaattgtaaaactagctatttatggcatgctgccaaaaaaccttcacagaagaacaatgatggaaaggttgcatctttttccagatgagtatattccagaagatattcttaagaatttagtagaggagcttcctcaaccacgaaaaatacctaaacgtctagatgagt

SEQ ID NO: 1916 - DNA, 246 bp, Homo sapien
acagacccagaaagaacaggtagtgagtagttatggtctcagcctctccagtcttgctgatcatgaagagctggggcaggatagccactgattccagatagatagagaaagtccagaggatctccagcagagtgaaactgtagttttcaaggaaggaaaggccaatgactgggaccagaagaaactccaggcggaatgtgtcattctcactgtcaaaagttttacggaatttcccatatatcatgt

SEQ ID NO: 1917 - DNA, 282 bp, Homo sapien
acaaatgcaaatactgttcccttgtgtcaattacatacagcatgcctacaaagagagaatggtaattcttcttcattcacagacaggacacatggcagtgcactattcaaaatgctttgataatcttaatttttgtttctggtgctgagatattatgaaaggaactgcatttgcaacttattaaatacttccaggaacaaatagttcactttgcttgggacttgtagttttgagtaattaatcatccatggagcaggagccagtcaggagatacccgttggt

SEQ ID NO: 1918 - DNA, 460 bp, Homo sapien
acatattaagataaatgtcatgtgtaagataactgataaatattggaactttgctagaacaagaccctgtagtaatagtaataatagttgaagtttggccaactcttaataaagttattttggtaactaatgttttatggcacttaagaataattagcagcgttaaattttgtttgtattaagcacttttaattttatccttcctaaaaatagtttattgtatctgacaagaaacttacttaaccattgtgtccttcccatcttttttgtcatctttgttttcttcaaatgccctcctcccatctgccttgagattccctcgtcttcacttaaaagccagagtgcaagtcatgatttgcgggagggctcttgaaccacttctggctgcaccacaattctgtacctgcccgggcggccgcccgggcaggtacctggagctgcagacctgggggttgcccat

SEQ ID NO: 1919 - DNA, 515 bp, Homo sapien
accgaccatagagcaagaatcaagattctgctaactcctgcacagccccgtcctcttcctttctgctagcctggctaaatctgctcattatttcagaggggaaacctagcaaactaagagtgataagggccctactacactggcttttttaggcttagagacagaaactttagcattggcccagtagtggcttctagctctaaatgtttgccccgccatccctttccacagtatccttcttccctcctcccctgtctctggctgtctcgagcagtctagaagagtgcatctccagcctatgaaacagctgggtctttggccataagaagtaaagatttgaagacagaaggaagaaactcaggagtaagcttctagcccccttcagcttctacacccttctgccctctctccattgcctgcaccccaccccagccactcaactcctgcttgtttttcctttggccatgggagggtttaccagtagaatccttgctaggttgatgtgggccatacat

SEQ ID NO: 1920 - DNA, 510 bp, Homo sapien
  misc_feature (1)...(510): n = A,T,C or G
acaaccataatgcangttatgttttgcatacaaaatatgttctttacatcaaagcacatgttaacaaaaacaagttctagaaagcatataccctctaagactaatgaaaacgtctttagcagggaattaaaaaaaaattaacattcatttgataaatattttgtagaacttgaaatgaggattttatctctgagtattttttgtagtattccccttgtccagtttttgcagaagaatggcaaacacttatttctaaaatgaaatagccctggaaacacccagtggaattttttcaaagtaaatgtctagccttaacttgaagttcaagaagttgtagctacatactacattagtaaaatctgaaataaaattattcccagttaatctcttcacagtttcttaaaaaaatattagtggagataaattatctaccaactttaaaaatctaaacttatgttcactgaacaaaaataaatttagtttcagaacattgcctgttaacggcaaagt

SEQ ID NO: 1921 - DNA, 257 bp, Homo sapien; identical to SEQ ID NO: 1267

SEQ ID NO: 1922 - DNA, 221 bp, Homo sapien
acaataaatagagtgctctccaatcatggtgaatcctttattacatgcatacgttacagactgtctatatccataatggtcacgttccccttgaattattccattgtcaatttgtggtggtgctggacaataaatttctctgcactctggcaacgggtcactccactggacagagctgcctgaaataagacaaaaactagaagtcgagccaaataatttgt

SEQ ID NO: 1923 - DNA, 355 bp, Homo sapien
accatttaagtcagtttcttatttgagtatgaggtgtctatacatttctataatttaagattttggtaacgcttcatatcaaatgagttgtagatctacttaacgtatgacttctccttccaaagaaggaaggaaggctgacaagggagggagaagggatacctgctaatgatgatgtgctagaaagacgactcattacatgcttatcattgctggaaggacttcttccctccactgagccgtgggatgtcataagagcccttcgaagagctctttttggagttttggagaaagagaatgctcttgtaaccttttttgaagtcttttttattgctcttgatgctctactcaatgt

SEQ ID NO: 1924 - DNA, 420 bp, Homo sapien; identical to SEQ ID NO: 1848

SEQ ID NO: 1925 - DNA, 196 bp, Homo sapien
catctctccctcccaaggaaaaagaagtgtgactactggatcaggacttttgttccaggttgccagcccggcgagttcacgctgggcaacattaagagttaccctggattaacgagttacctcgtccgagtggtgagcaccaactacaaccagcatgctatggtgttcttcaagaaagtttctcaaaacagggagt

SEQ ID NO: 1926 - DNA, 257 bp, Homo sapien
  misc_feature (1)...(257): n = A,T,C or G
actcccgattgaagcccccattcgtataataattacatcacaagacgtnntgcactcatgagctgtccccacattaggcttaaaaacagatgcaattcccggacgtctaaaccaaaccactttcaccgctacacgaccgggggtatactacggtcaatgctctgaaatctgtggagcaaaccacagtttcatgcccatcgtcctagaattaattcccctaaaaatctttgaaatagggcccgtatttaccctatagt

SEQ ID NO: 1927 - DNA, 113 bp, Homo sapien
  misc_feature (1)...(113): n = A,T,C or G
tggttgggggccgtcccgctcctaaggcaggaagatggtggccgcaaagaagacnaaaaagtcgctggagtcgatcaactctaggctccaactcgttatgaaaagtgggaagt

SEQ ID NO: 1928 - DNA, 119 bp, Homo sapien
accttcagaatgcgattgagagcagacaggctcggcccacctatgcaacagccatgctgcagagtctgttaaagtagatgttgcacaccagccttacagctgggagcctttgccatggt

SEQ ID NO: 1929 - DNA, 331 bp, Homo sapien
actttggcctctctgggatagaagttattcagcaggcacacaacagaggcagttccagatttcaactgctcatcagatggcgggaagatgaagacagatggtgcagccacagttcgtttgatctccaccttggtccctccgccgaaagtgagcggagtttgtagagcttgcatgcagtaataaatgccaacatcctcagcctccactctgctgattttcagtgtaaaatctgtgcctgatccactgccactgaacctgtcagggaccccggaggcccgattagaacccaaatagatcaagagctgtggagactgccctggcttctgcaggt

SEQ ID NO: 1930 - DNA, 310 bp, Homo sapien
accctaggggttctggaagggaaaacatggaatcaggattctatagactgatgggccctatccacaagggccatgactgggaaaaggtatgggagcagaaggagaattgggattttagggtgcagctacgctcaccctaaacttttggtggcctggggcatgtcttgaggcccagactgttaaccaggctctgctggcctgtttactcgtcaccacctctgcacctgctgtcttgagactccatccagccccaggcacgccacctgctcctgagcctccactatctccctgtgacgggtgaacttcgtgt

SEQ ID NO: 1931 - DNA, 364 bp, Homo sapien
acttaatttctctttttaatttaagtgatctttctaattcgaaagctgtgttctttttgaataccgtgcatgggggttaagctgatgttaaaacagtttgcagtaaaaaaaaatgaatcagcttaagtcatttaatcatttcaagtgcattctgcatcctttaaaaataagtttaagaaatttaagagaattgtgttttcattaagttttgcatatcttttgttatgccatgtaaattccctttttcgtatgattaaaggaaggttatgataaaatgattagttcatttacattcacttgtagcaattacatgagaatttgaattttgtcgtgtttgggtttgttcattcctgtgaatgatggt

SEQ ID NO: 1932 - DNA, 145 bp, Homo sapien
  misc_feature (1)...(145): n = A,T,C or G
accaggtctgtgcaccnnatatgaatgtcttgaagagtcatgtggaacaacttgtccaaaatcaattcatatgaaagctttcagagtaaatttttttttctagctataagcatgcaataataaatctcaaacactgatttggagt

SEQ ID NO: 1933 - DNA, 308 bp, Homo sapien
acatttattcttaacacgtggaacatatagtataaagatttcatactgaataaatgatattcattaagccaaaaaaggaaaaaaaggaggaatttacatcaagttttagctacattgttgaaatacaaatatgcagattttatcactgaaaaaatctcaattgtgtttcttcatcagaacttcaactgaacctagaactttttcacacctcgattagaaagaaaacaaaacaaaacaaaaacccagaaaaaaataaactataagttgattggctgctgagacagcaaggactttttacagagacctgt

SEQ ID NO: 1934 - DNA, 363 bp, Homo sapien
actagaaccataaagttctatctgatggtaaattatgtataaaactaagataaaacagataattatgctctatctcatatctactgaaagtagaaaaggaggaagagtgacacttttaaatcaaactgctctagttttagcttagtggatggttaataaacacactgctttacgctgaagtgatcagatagctatttctacagttcagaagaacttaaaaatcaggttttaaagacaaaagaaagcagactcaaaacacagacaaagcagagaagaaaacaatgcccatgagatggtcactatttagacagtattataaaaagctaaagaacacttgggctttacttcactttgatgtcttgt

SEQ ID NO: 1935 - DNA, 177 bp, Homo sapien
ttcaaacaggatgacaatccccatgcatgtgatatgcttgctttctagattgagtcactcactgtcatgactgcccatcctcattgcctgtgcttcccacttcaccactctctcacattggctgttcatggaaggctgttttctgtgctctcatgcttctcccctcgcgtttcctgt

SEQ ID NO: 1936 - DNA, 521 bp, Homo sapien
atcggaggtgcctcagccatggcatggatccctctcttcctcggcgtccttgcttactgcacagaatccgtggcctcctatgaactgactcagccaccctcagtgtccgtgtccccaggacagatagccaccatcgcctgctcgggagagcaattgggggataaatatgtttgctggtatcagcagaggccaggccagtctcctctactgatcatctatcaaaataccaagcggccctcagggatccctgagcgattctctggctccaactctgggaacacagccactctgaccatcagcgagacccagtctatggatgaggcggactattattgtcaggtgtgggacagcagcctgggttatgtcttcggaactgggacaagggtcaccgtcctgggtcagcccaaggccaaccccactgtcactctgttcccgccctcctctgaggagctccaagccaacaaggccacactagtgtgtctgatcagtgacttctacccgggagctgtgacagtggcctg

SEQ ID NO: 1937 - DNA, 216 bp, Homo sapien
acctactggtgctgaaaaaaggaaaattccggcttgaaggaaaggagtttagaactctgaaaatttggtgacattgtttttccctgaaagaaatgtgtgttggatttaacagatgaaattatctgccctccaaaagtcctttagaagagccagtgcaaggctgaagaccaaagcgtcaagaacacgccagactctcagcttcctctgctttgctcc

SEQ ID NO: 1938 - DNA, 359 bp, Homo sapien
ctcctgtggaggcctgctgggaacgggacttctaaaaggaactatgtctggaaggctgtggtccaaggccatttttgctggctataagcggggtctccggaaccaaagggaacacacagctcttcttaaaattgaaggtgtttacgcccgagatgaaacagaattctatttgggcaagagatgcgcttatgtatataaagtaaagaacaacacagtcactcctggcggcaaaccaaacaaaaccagagtcatctggggaaaagtaactcgggcccatggaaacagtggcatggttcgtgccaaattccgaagcaatcttcctgctaaggccattggacacagaatccgagtgatgctgt

SEQ ID NO: 1939 - DNA, 523 bp, Homo sapien
accaagttttagatggagcaggattagatattgatttccatcttgcctctccagaaggcaaaaccttagtttttgaacaaagaaaatcagatggagttcacactgtagagactgaagttggtgattacatgttctgctttgacaatacattcagcaccatttctgagaaggtgattttctttgaattaatcctggataatatgggagaacaggcacaagaacaagaagattggaagaaatatattactggcacagatatattggatatgaaactggaagacatcctggaatccatcaacagcatcaagtccagactaagcaaaagtgggcacatacaaattctgcttagagcatttgaagctcgtgatcggaacatacaagaaagcaactttgatagagtcaatttctggtctatggttaatttagtggtcatggtggtggtgtcagccattcaagtttatatgctgaagagtctgtttgaagataagaggaaaagtagaacttaaaaactccaaactagagt

SEQ ID NO: 1940 - DNA, 378 bp, Homo sapien
acatatgtgaactcattggaaatattgtgtgtttaatgcaaatgatatattgaattgtttagcaatttgttttctttgcttaacgatgtttttgagatctgtgcatgttacttaatgtagctcaatccatcttctgtaattgctgtatagattgtcatcatatgattaccacattttacttacgcatttcttttgtgatggacattaagactgtttttaggttttgctattacaaaatactacacaggagcatcactatgcctgtgtgaaagtatatgtatgaaagtttacctagggttgattcctagaagtggaattgcaaagtcataggatatttatatattggtttttaataatacttccaaattgccctcctgt

SEQ ID NO: 1941 - DNA, 423 bp, Homo sapien
  misc_feature (1)...(423): n = A,T,C or G
tcttaatacagggatgatctcatagcatttagatatcagaaaaggttttgacctatatgtctttaatattttttgaatacatgtataatctttatcattcctcagtgtttcatttctcaaattctgtaaaaggaatataagaggaaagacaattcatatacaaagacaacgagattaaaaatatgcagtaggaaaaataattacttaaggggagattttttttacatgaaatctgggctttggatgtgtgtgtgtgtgtgtgcacatatgcactgtggtgggagtggggcaacttggggaatatgttacatgtgtgactttgttttgccctggcaaagttaatgttgttcanaaagggtaaatgtttggacacttgcaattgctcatggatgaatttatatgttttagtcatagaaaaattgt

SEQ ID NO: 1942 - DNA, 292 bp, Homo sapien
acctgactcaccaggtggctatgaggatgcagtcatgataaatgtaattgctcatatggcacctggtttattcaaaaagtgtttttcaaacatctaggtggcagattctgttacataagtaatggagagacagtggtgaactaaacaggcaaaaatttctgctttcatggagctgacattctggtaggcacaaagcaagccttaatatgtaaaatctatctcattataagaggaagtgatgtttgttagcatctgctgtgtgccgcagttatatggaggacctaaaaaaaaa

SEQ ID NO: 1943 - DNA, 394 bp, Homo sapien
acgcgaaattgtgttatgactgatagccttcagctacaaaaagataggactgacctggtttaaagtgttctattttgtaaatcattccatttgagtctttctgatgaacttggctatactgaaatctgttattttagtgaggctccaaaatgagcaaagctaggcctgattagagtagagtgactattaaaaaacataactttctaggagccataaatcaaagttttaaaaagatgtttggatatatttgagtattccgatcatgaaaacagaaattgccctgcctactacaaggacagactgatgggaaattatgcacctggtcaacttagcttttaagcagacgatgctgtaaaaactaacggcttctctgatatttattgtaagttttagt

SEQ ID NO: 1944 - DNA, 530 bp, Homo sapien
acacacatgttctcatatatgtatatatacatacatattcatatatgtgtatacatatatacatatgaaacaagtttttaaatgttggcagcatattttcacaactgcaacctaaacaaccactggaagtgggggtccacttaagttttgtttgccattagcttaataggggaaagctattttaattttccctgcaactttttggatatgagttatgatctcaaaatgtcatttaactattgcactaaaaagtaatttgaccttggaactcctttctagatggaaggagaataaagacatctgtagcatgtaattctatttttatttcttgactacataacctagcagtggtctaatactgaccgtttcaatttaaatgctggaaaaatactgaccaagactttctgtgaaaaagataatggaaaacagaaaccagttagtaaagccatgcaaataggaagtgattttcagccccaagaggactttgtatcatctatggctccatttaaacccaagtagcatctgtcctg

SEQ ID NO: 1945 - DNA, 329 bp, Homo sapien
ggagcctgaactgacatcaactcccaatttcgtggttgaagttataaagaatgatgatggcaagaaggccctcgtgttggactgtcattatccagaggatgaggttggacaagaagacgaggctgagagtgacatcttctctatcagggaagttagctttcagtccactggcgagtctgaatggaaggatactaattatacactcaacacagattccttggactgggccttatatgaccacctaatggatttccttgccgaccgaggggtggacaacacttttgcagatgagctggtggagctcagcacagccctggagcaccaggagt

SEQ ID NO: 1946 - DNA, 480 bp, Homo sapien
  misc_feature (1)...(480): n = A,T,C or G
acctcagaatagggcacctgtaagtcagtcagtgaagtctctgctctaactggccaccggggccattgtcttctgacacagccttgccaggaggcctgccatctgcaaaagagagttcactccttccgctattttcatgtgagtgtatccaatttccttgataagctccagtttcaggtattctgccatttggaaagttttacacactcgaaagatgttgccaatgatatcttctggtgagtagcccagatgccacaagtgagcaagaatcttgtaggcttcatcaatgttggcattcacacagtgctggatcatctcctttaccagcagtgggtggggctcgtcacagaccttgaacacgttctcactgttaatgaagccaaatcctgagaaggtggactgnaggttgttcagcgcctgcctcatgtctccctgggccgtgaagatgatggcttctangccgtcatcagnntagggtac

SEQ ID NO: 1947 - DNA, 498 bp, Homo sapien
actttttacccccagcatttatgatgtaaatctctttctctatggattatatctgtttaaagcattctttctaggttattttggggggacagtgccaagtccatctttgcccagtcaattcagtgattgatagcaatttacattaattgcagtaaagctctttggattagaaattagtgtggggaaagcttattctgttgttgtttttgtttactttcatatgatgaaaatgctgtgtttaagtgtttgtcaataggaagaatggaaaactgttgggatgatgtggtttgcaggttgctgtgcctgattcacagtgtatgttgtataagccaatgtccatacctgattatgagagcttcttaaattatatgatatcaaatttgttcctgtaactctgtatacagtgcttttctgcaaggtaaaaataacctgtctatgcatctgatttttgctacagtttagacactgtggtttacaaaacagcatgcactcaacttg

SEQ ID NO: 1948 - DNA, 289 bp, Homo sapien
actggttaatgaagctaacttcaactagtggaccatgggtagtttagaaaaacacatttccaaccatccatccgcacgcaatgcacctttgtctctaacatcctactgatcttggaaaacacaggccatcagaaaggatgagcaggggctctgaacttattttaagatctcgcaatgccagcaacggcccctttgttgggataagtttacaggtatatttcacaggacaaaaacgcttgtaggaaaaacatggttgggtgtgtgtatactttgatgatgaagatttcac

SEQ ID NO: 1949 - DNA, 207 bp, Homo sapien
acttacgccataccccagaatacaataaataagcaattagaaaacgttcaagtatgaagggatttcctcctccccgccaaaagcactgctctctgaaggaagctggtttctctgtagctacaccagctgttcagaagctcattggacctggttttgaaaataaaacaaagttaaaaccctgggaggagttattgtgcagtgtggagt

SEQ ID NO: 1950 - DNA, 454 bp, Homo sapien
acatttgtatacctgtaatgtaaatgtggagaagtttgaatcaacataaacacgttttttggtaagaaaagagaattagccagccctgtgcattcagtgtatattctcaccttttatggtcgtagcatatagtgttgtatattgtaaattgtaatttcaaccagaagtaaatttttttcttttgaaggaataaatgttctttatacagcctagttaatgtttaaaaagaaaaaaatagcttggttttatttgtcatctagtctcaagtatagcgagattctttctaaatgttattcaagattgagttctcactagtgtttttttaatcctaaaaaagtaatgttttgattttgtgacagtcaaaaggacgtgcaaaagtctagccttgcccgagctttccttacaatcagagcccctctcaccttgtaaagtgtgaatcgcccttcccttttgt

SEQ ID NO: 1951 - DNA, 166 bp, Homo sapien
acaggacacaggcactcctttgtctggtagagaggaggaggggaaatggagctattccaggatacaagggatggcactgagggatgcataagtcccctgcctcccttgtctcaacatgttctcctctgccagcccagtcagcttggggagctaggtatcagaaacc

SEQ ID NO: 1952 - DNA, 220 bp, Homo sapien; identical to SEQ ID NO: 1076

SEQ ID NO: 1953 - DNA, 276 bp, Homo sapien
actagtgggtctctgctcccagtctcttctctgtgccagccgtcgtggcctactggaatggcacagagagcttttcttttcgttgcagaacagcctggaacatgacatgctagatcaatgtccatacacgtccacagaaataaatgaatgttccttctgccatgactcatgtctcggggacaacgggttcgcccgtctagggtgtgagctgacgcacacttcactccctctgacctggaatgtgtggggcttctaactgcggttttcaggttttac

SEQ ID NO: 1954 - DNA, 448 bp, Homo sapien
acttaatttgcatgttccatttcaaaaagttgtttttaagatttcagagaatttttttcaaagaaatttcttaaagctaacttcatttagagcttggcaaaatgtatcagccaggcacagtagttcatgcctgtcatcccggcacttaaggaggccgacacaggaggatggcttaagcccaggaatttgagatcagccttggcgatagagcaagaccccatctttacaaaaaaatgtttaaaaattagctgagcctggtaatacatgcctgcagtcccatatgcaaaacatagctggggctacacgggagggtgaggcaggaagatcacttgagcctgagagttggaggatgcagtgagccatgattgtgccactgcactccagactgggtgacagagtgagatcctgtctctaaaaaacaaaacaaacaaaaagctaaaaaaaaaaa

SEQ ID NO: 1955 - DNA, 577 bp, Homo sapien
  misc_feature (1)...(577): n = A,T,C or G
acaaacccaggcctgggcctaggaaagggcagaagaaaggcaaagggtcccttggagcaggaacccatccctctctgcttatacccagcacccctcatcccaggttcctttcttcaacctccgcctgcctctgggaacacagagcaccaagaactgacaaaccgggaccctccagggccacagcgtggggcagagtccaggcttctgtctccccgcagtgggagatctggggagctcagtgaacctcctcaccctcctgccagtatgaagttgggaagcgccttctctgtcccccagaacagaacaaactcttgttctctgtggttggggaaaaggtgtggggggcttggacctaggaagaagctgagctgaattcctccagggcccaggtgaaacccccaggggagtttctgagactctagacttgccatttctccacttttccttcccaatgactccggtgagcagctcanagtctggctagggcaactggtaggacagtggggatctgccccagagacatctgtgggtttcagatgaaggtttccccaacaccagattcatttatatgtacctg

SEQ ID NO: 1956 - DNA, 327 bp, Homo sapien
acctgggagagctgcaaacagccatggagataagagaggcggggagggaacacagtgactgagtctgagagacagcaaagcacctctccagcgaaagccactccgagatgcagcctaacttcctagtttgcatcagcaagatgagcaggcaccaccatggaaagagcacctggggtgtagctggttaccacagctcagccacattccccagaaacggaggtcagccctccatggcccaggaaaacatgggggatgaagggttggcacctgcagtgaccagatggagatacaatgcaggcagctgctaccatgcttggtgaccagggt

SEQ ID NO: 1957 - DNA, 179 bp, Homo sapien
  misc_feature (1)...(179): n = A,T,C or G
ctgtggccaaggccccagtgaaagcagctaccacccctacccggaagagttctagcantgaggattcctccagtgacgaggannaggagcaannaaaaacccatgaaaaataaaccaggtccctacagttcagtccccccgccttctgctcccccaccaaagaagtctctgggaaccca

SEQ ID NO: 1958 - DNA, 321 bp, Homo sapien
acctaataatatgttaacataaacataacaacacacatattatttttctaccccttggcaactgaaaatgaagttaccattcctaggccaaatttttagacaaagctttctaaaaccatctttataaagtaaattcagatatgcttacaataaaaagacataaaagattcatcctgagatgaattctgagtcaataactaaaaaccatttctaccagtgcatcactaccatgtaatccattctacgcaagctctacaaatattgagtcaaatcctgtctgtcagaaaatgaagacccaataagtttgccgaagtattcagt

SEQ ID NO: 1959 - DNA, 480 bp, Homo sapien
  misc_feature (1)...(480): n = A,T,C or G
gggatggaaccctgcgcctctgggatctcacaacgggcaccaccacgaggcgatttgtgggccataccaaggatgtgctgagtgtggccttctcctctgacaaccggcagattgtctctggatctcgagataaaaccatcaagctatggaatatcctgggtgtgtgcaaatacactgtccaggatgagagccactcagagtgggtgtcttgtgtccgcttctcgcccaacagcagcaaccctatcatcgtctcctgtggctgggacaagctggtcaaggtatggaacctgactaactgcaagctgaagaccaaccacattggccacacaggctatctgaacacggtgactgtctctccagatggatccctctgtgctttctggaggcaaggatggccaggccatgttatgggatctcaacgaaggcaaacacctttacacgctagatggngggggacatcatcaacgccctgtgcttcag

SEQ ID NO: 1960 - DNA, 272 bp, Homo sapien
cttccagttgctcccagaactcgaacttctcaagaagaattgctagcagaagtggtccagggacaaagtaggacccccagaataagtccccccattaaagaagaggaaacaaaaggagattctgtagaaaaaaatcaagattactatgacatggaatccatggtccatgcagacacaagatcatttattctgaagaagccaaagctgtctgaggaagtagtagtggcaccaaaccaagagtcggggatgaagactgcagattcccttcgggt

SEQ ID NO: 1961 - DNA, 354 bp, Homo sapien
acaaaacagaatgaattcttaaggcatatcagaaatgctgagtcccaggccggggccctgccccagccagggctgggactctgcagttgggagcttgtccagctgccccctctaatgcttttctcctccaggacacagggagcctccggaagcacagtagtccccgtgtgtcaccttaggctgacctctgtccccaggggtgacgtaatgctgtcactgtcttgaattcttcatcgtttaacagggagcccagtgttttcactttgcgcattgggtatctggtcttgcctgtcctaccctgaacctgggttccctgggccatgtaacacccaggcagctctgatgcccctgggt

SEQ ID NO: 1962 - DNA, 388 bp, Homo sapien
  misc_feature (1)...(388): n = A,T,C or G
accttttaaataantataagggatggcaaagtttttccctttaaaaatactcactttatgcttataaataggttaatgggctgataaaaggttttgtcaaacattgcaagtattcggtgctatatataaaggaggaaaaactagttttactttcagaatgatttaaacaagatttttaaaaacaagatacatgcaagcgaacagcagggttagtgataggctgcaattgtgtcgaacatcagattttttgttaagaggagcaaatgactcaatctgatttagatggaagtttctactgtatagaaatcaccattaatcaccaacattaataattctgatccatttaaaatgaattctggctcaaggagaatttgtaactttagtaggt

SEQ ID NO: 1963 - DNA, 194 bp, Homo sapien
  misc_feature (1)...(194): n = A,T,C or G
actatagggccnntacgggccctatttcaaagatttttaggggaattaattctaggacgatgggcatgaaactgtggtttgctccacagatttcagagcattgaccgtagtatacccccggtcgtgtagcggtgaaagtggtttggtttagacgtccgggaattgcatctgtttttaagcctaatgtggggaca

SEQ ID NO: 1964 - DNA, 158 bp, Homo sapien
accccgtggaccttcggccaagggaccaaggtggaaatcaaacgaactgtggctgcaccatctgtcttcatcttcccgccatctgatgagcagttgaaatctggaactgcctctgttgtgtgcctgctgaataacttctatcccagagaggccaaagt

SEQ ID NO: 1965 - DNA, 164 bp, Homo sapien
ttcaaattgtcttctccacgaggtggaatgaagaaaaagaccacccattttgtagaaggtggagatgctggcaacagggaggaccagatcaacaggcttattagaagaatgaactaaggtgtctaccatgattatttttctaagctggttggttaataaacagt

SEQ ID NO: 1966 - DNA, 93 bp, Homo sapien
caggcacccatccctactgacacggtctccctggggaccctgtcagcatgtccatgggacttggtcctgatgttggaccgtaagactccaggg

SEQ ID NO: 1967 - DNA, 345 bp, Homo sapien
  misc_feature (1)...(345): n = A,T,C or G
acggaccatgtgctatcntataaatcgaatggcttaaactaatttgctatgatcctctaacaccgaaatttcccataaacttaagtgcctacacttaggacttttgaactttcagtcatctttttcgtggtgtctcactgaacgatgtgttagaacatgtgttccatttggagttttgggcctgtgcacggnnaaccccaattaccaatttagnntgaggctggattcgattgctcanttcacctgccacgttctctccaaggagtggggtctacgtgacctttagtcctctacctcagagccccgnntcatttntgaccaccccgttctgtgtcctcactcttg

SEQ ID NO: 1968 - DNA, 507 bp, Homo sapien
  misc_feature (1)...(507): n = A,T,C or G
ctcaggaggcagcgctctcgggacgtctccaccatggcctgggctctgctattcctcaccctcctcactcagggcacagggtcctgggcccagtctgccctgactcagcctgcctccgtgtctgggtctcctggacagtcgatcaccatctcctgcactggaaccaccagtgacgttggtgcttatgagtatgtctcctggtacctgcccgggcggccgcccgggcaggtactcaataagtggtattgagtaactagtaatactcattggaacttaaaacatcatcttttatccaaaaatttcaaagggcaatataggaaagtattacaaattttacataaaaagaagatgaaacatgagaaaaaacaaagttatttncctgcaaaagcagatcaaatagtgagacaaggaactttgacttctagtccctttaagcaggacgtaactgctagacacantctgaatgtctagatatatttataactaaacttacaangatcaaaaaaa

SEQ ID NO: 1969 - DNA, 258 bp, Homo sapien
  misc_feature (1)...(258): n = A,T,C or G
acttcttgtcaaatnccttcttgatatgagccgcaatgtccttctctatgttgtatttctccagcgcctgagtagcgcactccaccgagtcctgttgcatctcttccgacatgtccgcatttttgatcacggcctttcggtcgcacatggttacctagtgggcaaggccgtggagaagggggctggccgactgcaacggtctcctgggggaggtgctagcacagctcaggcccggctagagctaccgtcgctaccgaa

SEQ ID NO: 1970 - DNA, 256 bp, Homo sapien
  misc_feature (1)...(256): n = A,T,C or G
ctgaagtggcagcnncatcagggattgcttcctcctggtatgaccatagatttgtttcgaggcaaggcagctgtcaaagatgtggaagaagaaaagtttcctacacaactgagcaggcatattaagtttggtcagaaatcacatgtggagtgtgctcgattttctccagatggtcagtatttggtcactgggtctgttgatggattcattgaagtatggaactttactactggaaaaatcagaaaggatcttaagt

SEQ ID NO: 1971 - DNA, 373 bp, Homo sapien
acaacatcgatgaaattcagacatacaatgtaaagttgaaataatcccaaattattttacattatttatgtatactttacaaataacacaaatatggaaatgttttcttggaaagctgttggaactgtaagcactgcaacgtatgaaagaaacatatttagcaataaaaaatttaataatatcctacaactgaattagttgcatatttataccattcaaaatcttgattttaacctcattcactcctttgaaaaatacattcctcttttgttcttttaaatgcaaaattagtggcagttgcagcaaaaacgccgaaattctataagaaaaaaactgatttaccccaaacatatcattcagcacaaactgcggt

SEQ ID NO: 1972 - DNA, 321 bp, Homo sapien
accgaacacaggaaagaagagtgggaaattgaaggcctcctataaacgggattgttttagtgttggcagtaatgttgatatagatttttctggaccaaccatctatggctgggctgtgttggccttcgaagggtggcttgctggctatcagatgagttttgacacagccaaatccaaactgtcacagaataatttcgccctgggttacaaggctgcggacttccagctgcacacacatgtgtgagtgtttataatttattccttagtatcagtgcagttgcccaaaatattgtagccattagcatgctgagaagtgatggt

SEQ ID NO: 1973 - DNA, 506 bp, Homo sapien
acatcttccaacagtgtgaggctcctatggaaggtttccagctttgaagcaatactctgctttcacgttcctgtgtcagaccaggctacccagtcgagtcctcttgtggagcccacagtcctcatggagctaacttctcaaatgttttccataatactgtttgcgctcatttgcttgccttgcgcacctgctctcttacacacatctggaaaacctccggctctctgtggtggaatacccttctaataaaagggtaaccagaacggcccactctcttttacggaaaaatccctaggctttggagatccgcacttacattagagttatgggaatatacacatattaatgtggctccctttttcttgtgggggaataaaagaggactcctcctcattccctttaacatgggggaaaaactgacattaaaagatgagactaaatctttatcttgaattttacacaactacttacgacaagggagatgtttagacctgttgtgtaatact

SEQ ID NO: 1974 - DNA, 346 bp, Homo sapien
acacagtcgtgtccgcggcggtcaaatacgtcattgtcagggagatctgggtcttggacgtgtcgactgatatggtgactcgactcttgagggacgggttgtagttggtgctccacgatgattgatttccccaatccactccagtcccttccctggggactgccggatccaggcccaccaataattactgaaggacccaccagagacaccgcaggtgagagacagggtctccgaaggcttcaacagtcctgcgccccactgttgcagttacacctgggacaggacccatctgggagctgccaccaggaggaggaagaaccacaggtgtttcatgttcttgtgcagg

SEQ ID NO: 1975 - DNA, 285 bp, Homo sapien
  misc_feature (1)...(285): n = A,T,C or G
acaatttgtggatgtcattgaatctagaggactttcccctttttatatttgtattaactttaacttattaaaaaaaaaaaagaaanngaacaaacaatttaaaaaaaaaaaaaagcaaccaaccccaacaacaaaaaagaatgttttggtattggagaagggatggtcagttagcctgtctgtcacacgacggaatggatactgggcccggggaccactttcatactcacgtcttcatccttggatacccaggggagggcgaaccgttttcgctcgtgtgtctgt

SEQ ID NO: 1976 - DNA, 362 bp, Homo sapien
acgaagggctgaggcaaaactgttttttaagttggtagatatgctcatgagcaaaggttccctgcatgtaatcatagccattccagctgtcaagttacgcatcatgtgatgagctgctattcgcattcgagattcctccgaatccagggcaaaatccttcctgactatttgctcacaaatagtcatggcaatcttaattgatcgatccaccacaggatggaccagctcctggacagcccgttcaattgcctgacgcacacactgcttcaactgtggatgggcctgaaacaagggaattgttggatttagagtaatgtgtggtgccaagcccgcaagggaatagacattgatgtcgtggtagc

SEQ ID NO: 1977 - DNA, 105 bp, Homo sapien
  misc_feature (1)...(105): n = A,T,C or G
acaagctttttcnncttttttttttttttttttcgnngntttgtttttcctgtntaaaaaaggaccccaaatntaaaggtagggaaagggacaannagggaacat

SEQ ID NO: 1978 - DNA, 257 bp, Homo sapien; identical to SEQ ID NO: 1118

SEQ ID NO: 1979 - DNA, 383 bp, Homo sapien
  misc_feature (1)...(383): n = A,T,C or G
actacaagaacatcgnnctgggcttcaagacacccaaggaggtgcggggaacctcagaagaaagaaggggaacctggcgttcctgcacgtgtgcccacgacgagttgccctgcctgcatctaagtggcttctggggctgctgggaattgtagttgcttccctgaggccacgcccctggctcttttaaggaaccgcccgcccaaggctcactcctttatctttcctatcctttcaggctattgagggcacctacattgacaagaaatgccccttcactggtaatgtgtccattcgagggcggatcctctctggcgtggtgaccaagatgaagatgcagaggaccattgtcatccgccgagactatctgcactacatccgcaagt

SEQ ID NO: 1980 - DNA, 125 bp, Homo sapien
acaactaccgccatggtggccgccaggggcagataatctataactggcagggtgcccagtctacccaggatgaggtcgctgcatctgccatcctgactgctcagctggatgaggagctgggaggt

SEQ ID NO: 1981 - DNA, 233 bp, Homo sapien
acatgacaaggtgcggctccctaggcccctcccctcttcaaggggtctacatggcaactgtgaggaggggagattcagtgtggtgggggactgagtgtggcagggactccccagcagtgagggtctctctcttcctcttgtgctcttgctggggctggtggtccaggggtcttactccttggaggccatgtgggccatgaggtccaccaccctgttgctgtagccaaattcgt

SEQ ID NO: 1982 - DNA, 292 bp, Homo sapien
actctttagcattaaattacatcgtgcatatacaactacacccatttagatttgccttggaatataatttcaaggccttaaatattaaaaataattttataactatttcatagtttaattggctcttaaatagttttgctagggaggaaacattttgtgttctttaagaaattgatatgtgtaaatgtgttcacttaaatcttgagaaaacctaaggatgaagtctgttgttttgtttttcctaaaaaaggaaaaaagaacctacttttataagccttctctgtttagaagt

SEQ ID NO: 1983 - DNA, 375 bp, Homo sapien
acaggtatgggacgggaaagccagaggtaggaaggctcagaaggagacagatggctctaaaagagttttccagtgtgtattctgaggaatactagtgttctggagatgttacttagtgtttcaagaaaaggagaattttggctgggcgcggtgactcacgcctgtaatcccagcacttttggaggctgaggtgggtggatcacttgaggtcaggagttcgagaccagcccagccaacatggtgaaatcctgtaactaaaaatagaaaatttagctgggtgtggtggtgtgtgcctataatttcagctacttgggaggatgacacatgagacttgcttgggcccagaaggcagaggttttagtgagttgagatggt

SEQ ID NO: 1984 - DNA, 234 bp, Homo sapien
acttttcacacaaacagaattttagaaaagcttaaggtcagggagtgctagagagtttctgtatggcaggcaagaattcttccttttgaacaagaccgaaaaacctcaggacaaagagaaagtatatcttttaaaaactgatttcatagtaatgtttctacatattttgaagcacctttatgtatttagagcatatcaaattaattcatttctttccctgttaataaaaaaagt

SEQ ID NO: 1985 - DNA, 444 bp, Homo sapien
acatgtgaagattttttggcagcttagcgtggaaaccattgatcaccctgctctcatttctacctgttctgtgttggcaagggagagtgcccaaatgagcaagatatcgcagcaaaacagcactccaggggtgaacggaattagtgttatccatacccaggcacatgccagcggcttacagcaggttcctcagctggtgcctgctggccctgggggaggaggcaaagctgtggctcccagcaagcagagcaaaaagagttcgcccatggatcgaaacagtgacgagtatcggcaacgccgagagaggaacaacatggctgtgaaaaagagccggttgaaaagcaagcagaaagcacaagacacactgcagagagtcaatcagctcaaagaagagaatgaacggttggaagcaaaaatcaaattgctgaccaaggaattaagtgt

SEQ ID NO: 1986 - DNA, 264 bp, Homo sapien
aggtgattccctcgcctttcaagcacgcggacatcgtcaccaccactactcacaagactcttcgaggggccaggtcagggctcatcttctaccggaaaggggtgaaggctgtggaccccaagactggccgggagatcccttacacatttgaggaccgaatcaactttgccgtgttcccatccctgcaggggggcccccacaatcatgccattgctgcagtagctgtggccctaaagcaggcctgcacccccatgttccgggagt

SEQ ID NO: 1987 - DNA, 242 bp, Homo sapien
  misc_feature (1)...(242): n = A,T,C or G
actcaagggaaagnngctcagtttgccagcataagtgccaaagaccatcgccagcatctgtccttcagggtgctcggacagaattcttaccacagcaaaggcataagatgcttgatacggaaaatcagaaacttaactcttttgttgcagatagtcatcagtggctctgtaaaaacgcagaggaaaagagccagaaggtttctgtttaatgcatcttgccttatctttttttattactgtgt

SEQ ID NO: 1988 - DNA, 282 bp, Homo sapien
  misc_feature (1)...(282): n = A,T,C or G
actggcctcaaaanntcaattggaaaagttccatcttttttcttctagaaaagtttataaaagcctggtattatttcttaaatatttggaataacttcagtgaagccatctgttcctagagttttctttctaagcaagtttttgaatactccactcaggtattgtttgcagttgtgacaaggcacaaccaatctctagtatgaccttgtttccagggcttttactgatggcatgttcaccaacccactggcacttcctaagttctaatcatttctcctttgt

SEQ ID NO: 1989 - DNA, 241 bp, Homo sapien
acagagatggagaacgaatttgtcctcatcaagaaggatgtggatgaagcttacatgaacaaggtagagctggagtctcgcctggaagggctgaccgacgagatcaacttcctcaggcagctatatgaagaggagatccgggagctgcagtcccagatctcggacacatctgtggtgctgtccatggacaacagccgctccctggacatggacagcatcattgctgaggtcaaggcacagt

SEQ ID NO: 1990 - DNA, 502 bp, Homo sapien
  misc_feature (1)...(502): n = A,T,C or G
acaatgaaattactgcatgcagcagtgtagaaaaattttactttttaaaagaattataaaaccatagctttataaatcagtggaaagtggcttacagagagaactatcagatgtgtttacatcacatcttattcactttttttaacagctctaatgctttggcattgctatgttcatatttatgtattccttatttatagctctgatagctttaattttctaagcagtctgtctatcagatgtgcacatctgctgtgccaggttgaagtatagtggaacccatcagtagtaatgtgtagtagttatgacttgttgacatttccattataaactttaattttgaattgtttatgcattataactgnggatttatattgtattgggctgaaagttgacaggatttcagccaccacttgtgaattttttatttagattcattatgtatatcagaatcttgttttttgaaataagagcatggaaaacatttcttgtaatctactct

SEQ ID NO: 1991 - DNA, 276 bp, Homo sapien
acatttccccgctgataacagcaccatcttccttcgacccccagaccaagggatcaaagctactgctcaattgagtttgacatcagctaccgacttttaaggaatctagaacaaagttctggagccaggccagaagtggtaaaagattcagttagccccttcctctgtgctgtgctgacagggagggagccagtgactggacaatctatgaccccaagtttgtggaacgtggggcttcagctgagggtggggtagtgtgatttcagcagtgtctgt

SEQ ID NO: 1992 - DNA, 537 bp, Homo sapien
  misc_feature (1)...(537): n = A,T,C or G
acgactatcttcagcttactactctggatacagttagctgccttcgaatagtgctgtccatagctagtggtcttgcacatttgtacatagagatatttgggacccaagggaaaccagccattgcccatcgagatttaaagagcaaaaatattctggttaagaagaatggacagtgttgcatagcagatttgggcctggcagtcatgcattcccagagcaccaatcagcttgatgtggggaacaatccccgtgtgggcaccaagcgctacatggcccccgaagttctagatgaaaccatccaggtggattgtttcgattcttataaaagggtcgatatttgggcctttggacttgttttgtgggaagtggccaggcggatggtnagcaatggtatagtggaggattacaagccaccgttctacgatgtgggttcccaatgacccaagttttgaagatatgaggaangtagtctgtgtggatcaacaaaggccaaacatacccaacagatggttctcngacccgacatttaacctctct

SEQ ID NO: 1993 - DNA, 372 bp, Homo sapien
  misc_feature (1)...(372): n = A,T,C or G
acaaaatgagaccangggaaatataaattagtggggcaggtcgggctccagtgggtggcaaagcagagaacatctatccagttagcctatgaggcttgaccctcagagttgctgtccttgggctggacttgaccacctgtaacttaagataaaacagtcccacccttaaggtcatcaaatgaaagacacaaggacagcatagcagaggcctagctggcttgtcagaaaaatgcacgggagatttcagttggctaaaacctcaatatgagccactgcatggccaggctgtgcaaaggagtggggctccattaatagtgcacggtgtggccccactgaggaggagagagtcctcccgcacacagcactggctgt

SEQ ID NO: 1994 - DNA, 82 bp, Homo sapien
caggtggccaactcagcttttgtggagcgagtgcggaaacggggcttcgaggtggtatatatgaccgagcccattgacgagt

SEQ ID NO: 1995 - DNA, 300 bp, Homo sapien
accgcggccgttaaacatgtgtcactgggcaggcggtgcctctaatactggtgatgctagaggtgatgtttttggtaaacaggcggggtaagatttgccgagttccttttactttttttaacctttccttatgagcatgcctgtgttgggttgacagtgagggtaataatgacttgttggttgattgtagatattgggctgttaattgtcagttcagtgttttaatctgacgcaggcttatgcggaggagaatgttttcatgttacttatactaacattagttcttctatagggtgatag

SEQ ID NO: 1996 - DNA, 342 bp, Homo sapien
ttttaacaggacatcatttaattgcctctagggtcctcctgggagagggactgcggggcctttggcagagctctggctgatggaaccaacagaggtgcccatcagccagtgccaggcaggatggcggccccaatgcttggctgggggcagccagcatttggggctgttgcttaagacaatttctgagactaatgggtaaggaatgttgcctttagatggaggagaggggactacatttagagaggagggaggagaagtggcctgcattgggggagggactctaaggttaggttaggaatgacagggagttggtcaaaaggtccttcatggccaggtgaaggc

SEQ ID NO: 1997 - DNA, 174 bp, Homo sapien
  misc_feature (1)...(174): n = A,T,C or G
tttttttntnntttttgttttgatagttatgtcttttaatatgtattagaagaatacataattagcacacatcaaacctgtgatttcacagatatcactacttgggatgaaaatgatataggataacaatgttagacctcagatcaacctcaagaaaaatactgagtaaatagt

SEQ ID NO: 1998 - DNA, 351 bp, Homo sapien
acttcatttgcctaatttttgccattctcataatgtggcaattgttcaattttgcatttcttccattttatttttttgcatctctgcttttcttttggttagctttgccagttctgcctattatattaatctcccagaatcagcttttagttttgttaaatctctgacatgtttcgttgattcctgctttcatcttaaacatttcttcgttgttaatttgtgtttgctataaaataagcaacatcttaaatgcttgatttgctttcgatgtttattctgtaataagatatttaaagatataattttttccctaaatgctttattagacttttctcataagttttgactggt

SEQ ID NO: 1999 - DNA, 411 bp, Homo sapien
  misc_feature (1)...(411): n = A,T,C or G
gatcctttaaaganacctaaacatttcatagacttttgcacaatggcagaatgcagttaagtggtttaagtggtgttagctttgagggcaaggcaaagtgaggaagggctggtgcagggaaagcaagaaggctggagggatccagcgtatcttgccagtaaccagtgaggtgtatcagtaaggtgggattatgggggtagatagaaaaggagttgaatcatcagagtaaactgccagttgcaaatttgataggatagttagtgaggattattaacctctgagcagtgatatagcataataaagccccgggcattattattattatttcttttgttacatctattacaagtttagaaaaaacaaagcaattgtcaaaaaaagttagaactattacaacccctgtttcctggt

SEQ ID NO: 2000 - DNA, 107 bp, Homo sapien
  misc_feature (1)...(107): n = A,T,C or G
acgtagtctaggccatntgtgttggagattgagactagtagggctaggcccaccgctgcttcgcaggcggcaaagactagtatggcaataggcacaatattggctaa

SEQ ID NO: 2001 - DNA, 354 bp, Homo sapien
cttggttgccaaacagatttgcagatcaaggagaacccaggagtttcaaagaagcgctagtaaggtctctgagatccttgcactagctacatcctcagggtaggaggaagatggcttccagaagcatgcggctgctcctattgctgagctgcctggccaaaacaggagtcctgggtgatatcatcatgagacccagctgtgctcctggatggttttaccacaagtccaattgctatggttacttcaggaagctgaggaactggtctgatgccgagctcgagtgtcagtcttacggaaacggagcccacctggcatctatcctgagtttaaaggaagccagcaccatagcagagt

SEQ ID NO: 2002 - DNA, 319 bp, Homo sapien
cgtgaaacttaacactttataaggtaaaaatgaggtttccaagatttaataatctgatcaagttcttgttatttccaaatagaatggactcggtctgttaagggctaaggagaagaggaagataaggttaaaagttgttaatgaccaaacattctaaaagaaatgcaaaaaaaaagtttattttcaagccttcgaactatttaaggaaagcaaaatcatttcctaaatgcatatcatttgtgagaatttctcattaatatcctgaatcattcattttagctaaggcttcatgttgactcgatatgtcatctaggaaagt

SEQ ID NO: 2003 - DNA, 333 bp, Homo sapien
  misc_feature (1)...(333): n = A,T,C or G
acagattgaaatttagttgnttcattggctgtctgaggaggtgtggacttttatatatagatctacataaaaactgctacatgacaaaaaccacacctaaagaaattttaagaatttggcacagttactcactttgtgtaatctgaaatctagctgctgaatacgctgaagtaaatccttgttcactgaagtctttcaattgagctggttgaatactttgaaaaatgctcagttctaactaatgaaatggatttcccagtaggggtttctgcatatcacctgtatagtagttatatgcatatgtttctgngcatgttctctacacaattgtaa

SEQ ID NO: 2004 - DNA, 423 bp, Homo sapien
gggagctttgtctataagggtggaaaaatctacaaggttccttccactgaagcagaagccctggcatctagcctaatgggattgtttgaaaaacgtcgcttcaggaaattcctagtgtatgttgccaacttcgatgaaaaagatccaagaacttttgaaggcattgatcctaagaagaccacaatgcgagatgtgtataagaaatttgatttgggtcaagacgttatagattttactggtcatgctcttgcactttacagaactgatgattacttagatcaaccgtgttatgaaaccattaatagaattaaactttacagtgaatctttggcaagatatggcaaaagcccatacctttatccactctatggccttggagaactgccccaaggatttgcaaggctaagtgctatttatggaggt

SEQ ID NO: 2005 - DNA, 251 bp, Homo sapien
actccttctgtgtatttcaggtcgcaggaattcaaccattccttgatggggtcaagagaggctacaggaatggcgttgatcatggtcactttcttgctgtagtccttgtagacgattaccatatcaaagttcttcaggtgaaactggacccgctcaaagtggatcagctctacctcatccaatgtcaccacaaaaggtggccattccgtagcatttaccagcgcactactagtgggctgaaggaggcaggt

SEQ ID NO: 2006 - DNA, 402 bp, Homo sapien
  misc_feature (1)...(402): n = A,T,C or G
acttatctgctnnancacagtaaaaactgagaatttagcagaattatttggaaatggctggcaaccactaaatattggttaatgaatgaatcagttaatatggaatgatgctgtgttggcacaataaaggagtagctctgaacacagagggactttttcgaaatagtgagatatatgaggactggaataatacaagaagttttcctggaggaaggatatatgggatttggagaggcagaggggagggagggctgggatatgatccctggtgtagacacagcatgagcaaaggcatggaggtggtgtggtagagagttgtcatgtgttccagggacaaggaggagactggcttagctggagtgaatgttggggatagtgaaagtttagatatggaggaagtgt

SEQ ID NO: 2007 - DNA, 441 bp, Homo sapien
  misc_feature (1)...(441): n = A,T,C or G
acgtgtgtannttttgttcagtgacttcttcagtgtctcagccagctgagcaaataaagacactacataggcatagttcatgttcaaagaatgagagtaatataaactaattaatattcacactacctcttctaactggttaagtatcattatctcaatttggcagatagaaaaaagaggtagaaagattaagtgacttgcttacagctacagagagaatatttgtcaccagattatcactccagaaagtctagcactttgttcagacaaacagaccacaccttattaggaagatataaaacgcatgataattacacttgggaaaacaatacaattaaggaatggggaacaaaaaggtagtttanggggatataaaactatgaataagtagcttaaaaattcaatcaataaagttgtgttacaacacctgggggaacagca

SEQ ID NO: 2008 - DNA, 92 bp, Homo sapien
  misc_feature (1)...(92): n = A,T,C or G
cnaggtacaaagacaaagaancaaactacattggcatttaagccaatcaaaaaaggaaagaagagaaatccctggtctgattcagaatcaga

SEQ ID NO: 2009 - DNA, 157 bp, Homo sapien
  misc_feature (1)...(157): n = A,T,C or G
acgtgccaagcatcctcgtgcgaccgcgagagcccggggagcgggggcttgccggccgtcgcactcatttacccggggacagggagaggctcttctgcgtgtantggttgtgcanagcctcatgcatcacggagcatganaagacgttcccctgctg

SEQ ID NO: 2010 - DNA, 183 bp, Homo sapien
acaaatttggtgacagaaaagacttcagtatatgctggcatcttagaagcagttctcaaagagcttagttttattttcttgaattttaagaatgcctaagatccttcttcatcctcgatcttgggagccaagtagtattttaagtgtcccatatccgcaattttatactctacaacaaggggt

SEQ ID NO: 2011 - DNA, 464 bp, Homo sapien
actttgtgcaatattttaaacatccatcattctgtcagcaaaatgattgtcacaggaagtatagggcacacgtttctctattcagtgagtgacagtgagctacaaaacactggaaagaactgaaactgaggaaggaacttgtaaaaagaacttcaaaattaccaagaagaaggctgtcccagaagaaatatctctttagtctaatcagactttctgaaacttatgtgtaacttaggctgtagatggatggatttcccatattcataattttacaaataatcactcaatattagattaattaatacagtaacatatttggcaagggcgactcaggaagaaaaatcagttactcattacattctctcagaagcatcttttcgtagcatgatcattttgactaaaaaaaaacagttaactatccacaagcatcataactagcaattaattctacatgaaatatctgt

SEQ ID NO: 2012 - DNA, 354 bp, Homo sapien
acactatccattagagtggaaaggggccaagaggattaataagtgccaccaagtttctaaaactgcagaatcagaggcattgtgcatgctgacaatggtttaaagggtctctcaattttactttaatcccccatttaacctttgtttctttcaaaaaatcaactgaaagcggttaactgaatataaatctattttacagcatttactacgttaatttaaaaatcaacaagctgtaaaatacttacattattcacacatatatagacggaatcatccagaacataatcaactgccaaccccccttaaaaaaaatcaacaaatcagtttttatttgcatggccaattatcatttgt

SEQ ID NO: 2013 - DNA, 508 bp, Homo sapien
acccattaaactgctaaaaaacaaattgagtggtgagaatacaacagaagtccaatttagattctgagtgttgtcaccatgtgattacaatcacacagacacttccaagcttatagctggagctcctggaagctatttcatactctggtgcaagggccaaaaaaaacacaacacaagaaggaataagtcctgaattattggcttcatcacatccaccttctccaccccaaaatggcacaaaagaaacagttaccacaccctgcagaccttttggtgtaaaagagatgatgatgaactggggtgggaacaggtcatgaagatctgtctaaaaaagtcccattcaggtgagtttgtacatacatctcctacaataggaagtaatgtagaagagatagtgattaataatacacgtttcctaatgtgggatattggtggccaagaatctcttcgttcttcctggaacacttactatactaacacagagtttgtaatagttgttgtggacagt

SEQ ID NO: 2014 - DNA, 381 bp, Homo sapien
acaaaccagttttattagggaactgccccaggtgcacctctggttcatgctcttgtcacacctgtttctcagatcagcccaggctcagaggcaagttactagctaagcaaagaggaaaactgttctgcaaaatagcaactgtcagcttaaggcattactaacattgcagaaggaagcaagatttactagggacatctggatagcccaggacaatgacttctgggaacaggaagctccctagggccagatcgtgctgccatccaacttgggagatgacattatcgtgctgggatggtgggtaactccttcaaaccaatccatgtcacagaacactgtctattccttgagcttttggatttagaaattagttatataaaaagt

SEQ ID NO: 2015 - DNA, 329 bp, Homo sapien; identical to SEQ ID NO: 1146

SEQ ID NO: 2016 - DNA, 391 bp, Homo sapien
acactttgctgctacaaactacatcttgatgggattaagaggctacattgattcttgggtttattgcaccaacaatccatctctgacctacccatggctgcatctgaaacaaggtaaactccaagaagaaatgaaaacagtgggtccctaaagcactcttcccaacaagcaattcttacatgttttatgtcaaacagtcactgctaaagccactggagctgaagatggcacaatgtggctttctttgctttaccttgtctaaaaagcaaactgtgacctggaatccaaagtctgtattctgattgttgtctcagaatagcaaaatatgttttctccagtttggggagctcatgcttaaacttggaagcagtttcctactggaatattatgt

SEQ ID NO: 2017 - DNA, 476 bp, Homo sapien
acatctccactgagttcaaccgttatggcatctccaatgagaagcctgaggtcaagattggggtttctgtgaagcagcagtttaccgaggaagaaatatacaaagacagggatagccagatcacagccattgagaagacttttgaggatgcccagaaatcaatctcacagcattacagcaaaccccgagtcacaccggtggaggtcatgcctgtcttcccagactttaagatgtggatcaatccatgtgctcaggtgatctttgactcagacccagcccccaaggacacgagtggtgcagctgcgttggagatgatgtctcaggccatgattaggggcatgatggatgaggaagggaaccagtttgtggcctatttcctgcctgtagaagagacgttgaagaaacgaaagcgggaccaggaggaggagatggactatgcaccagatgatgtgtatgactacaaaattgctcggagt

SEQ ID NO: 2018 - DNA, 265 bp, Homo sapien
  misc_feature (1)...(265): n = A,T,C or G
taanctcntcattctacaagcactgaggatatgaagcttaaaaggtgaaaacttgaatacccttagaaaaggggaacagtctgaggcaaaagttgtaggcctgtaaatatatattttattttattttcatcttttttgagacggagttttgctcttgttgcccaggctggagtgcagtggtgtgatctcggctcactgcaacccccacctcccggcttcaagtgattctcgtgcctcagcctcccgagtagctgggattataggt

SEQ ID NO: 2019 - DNA, 276 bp, Homo sapien
acattccaatatgtttacagctgcaagataatgaggcacactcagtattgcacttcattaaaatttcaggctcaaacttaacctagaagtttaaatgaaattgcatttgtaatttagtaattcttatacaggacaaacattgatatgtttatatacagtgtgatacttattacatttatatgctgtcctaacacaatgttttttttttttttaaataacagtctaggaaataaaccagaatattcctctttttatccccacccgtgatgcaattgt

SEQ ID NO: 2020 - DNA, 406 bp, Homo sapien
accagtgctggctgcaggtattaagtccaagtttattaactagatatttatttagtattgagagtaatttgtgaatttgttttgtatttataaaatttatacctgaaaaatgttccttaatgttttaaaccttttactgtgtttttattcctctaacttccttaatgatcaatcaaaaaaagtaacaccctccctttcctgacagttctttcagctttacagaactgtattataagtttctatgtataactttttaactgtacaggaccacgttccagtcctcctgggtcaggatctggaacacggtgacgatggcccacagcagggagtcgaagttcttcctgtcaggcacggtgtctccggtgtctgtcttcaggctgaacttgcagccgaaaaggtgcatgcc

SEQ ID NO: 2021 - DNA, 529 bp, Homo sapien
actattctgtgtcattcagtaaagaggcgaagtattatcagctgagatgttccggtcctggtctgcccctctatactctacacagcagcgtgaatgataaagggctgagagtcctggaagacaattcagctttggataaaatgctgcagaatgtccagatgccctccaaaaaactggacttcattattttgaatgaaacaaattttggtatcagatgatcttgcctcctcattttgataaatccaagagatatcctctactattagatgtgtatgcaggcccatgtagtcaaaaagcagacactgtcttcagactgaactgggccacttaccttgcaagcacagaaaacattatagtagctagctttgatggcagaggaagtggttaccaaggagataagatcatgcatgcaatcaacagaagactgggaacatttgaagttgaagatcaaattgaagcagccagacaattttcaaaaatgggatttgtggacaacaaacgaattgcaatttggggctggtcatatgga

SEQ ID NO: 2022 - DNA, 317 bp, Homo sapien
  misc_feature (1)...(317): n = A,T,C or G
cttttttttttttttttttttttttttggaaagttgaatattttattatttacacatataaagtgagaatgaaaattgggcatggggcaagggcaggaagatgactccagctcagtcggngatgatgagctcgtccaccccccagtcttcatagctcccatctggcaggtaacggcgaatgatgatggggatctttcgggccttgagttccttcatggcaatgagcanaggatctgtctccccctccagctccaccatcacaggggcacacatcgcaatctggagcgctcgggtgcccagcacgcgggctcgctcgt

SEQ ID NO: 2023 - DNA, 218 bp, Homo sapien
acctaagcagtaagcgtatttaggttaatgcagtttcacttatgttaaatgttgctcttataccacaaatacattgaaaacttcggatgcatgttgagaaacatgcctttctgtaaaactcaaatataggagctgtgtctacgattcaaagtgaaaacatttggcatgtttgttaattctagctttttggtttaatatcctgtaaggcacgtgagtgt

SEQ ID NO: 2024 - DNA, 543 bp, Homo sapien
acatggctgagcatgcactatttatagttacaaagatacctgccaatttattacaatagaattacacagtgcctgaaaatggtgaaacatctcacacatcatttaaatcaatataatttcaagcaggaaacgttccttatttgaccacaattgcaataattacatgaaaattcttataaaaacatgaatctccttcaagaaattgatgcatattctacgcactacaggttaaggcagtaaaaaaatgtattcctgataactggaggtgttgacaatgtcaattaaagctgtctgactctagtttttcattctccatcatataccaaaagtttgtgaatgatttcatttttaaagtcaacaaagtattagtaactaagaagagttgaagctggaaaaaagtaattgctagggaagggaaaaatgtaaattggattttgcctgaaagttttcaaatcataaacaatagcattatttatgagtctaagccttaaatgtataaaacaaatacatatagttcacttttcttaatttaaaatatactgt

SEQ ID NO: 2025 - DNA, 506 bp, Homo sapien
  misc_feature (1)...(506): n = A,T,C or G
tacnactcctatagggcgaattgggccctctagatgcatgctcgagcggccgcccgggcaggtacactgtcttaatatgaatgggactgcttttctacttgagccatttttaaccaaagcaaaataacctaagtaatacaaagtgttaaaatacagcataaagatacaaaaacagacatactaattctagttaggaatgtaattatgatgttacattttttataatccacaattatgtttagggaatcacacaaacatagatcactgatttgaatgaaatgcataaatttgtagcaaagctttgtagttacaaaaaacaaaaaaattaccaaagaatgcacaaaattaatgtttattccacctttgtgtcatattcctggatccttcaccaatgttacatgaggaaaaaaacaaaagcaaaacaaatgaaaaactgaaatcagaatcactaatattatcaaatagggaaacaaataaattaaaatctagcagccatcagcaagagt

SEQ ID NO: 2026 - DNA, 510 bp, Homo sapien
  misc_feature (1)...(510): n = A,T,C or G
ttttttttaaggggctgtaattatatttattagattaacaaggcagatgtgaattttctcttctataatccagtaagtctgtgtattcgttgactcagacagacaagaagccacaaggaaacaaagaagtaatcatttgttgagagacgttattaactatgatcttccctgaagctaccgggatgggaaaggtcagtgtcttcctttgaaccctgagacaattaggggctcttgaggcctgctgtgcccctgctgccaaggcagcctcaagttcaaggagcagctaatcacccactcctgcattcagcctgtcttgcctgatgagggctacgcaggctgcctcccattggtgtgcactgtttcctttttcagctgctaaatgggctgaacaccatcggcctggggtatccctttttggggaatacatctgtctgtccgaactcctttcccttcaaatggcactgtgataaaatctggtcataccatgctccancactggaagtacctcgg

SEQ ID NO: 2027 - DNA, 306 bp, Homo sapien
actcaaaatacagtcaccactgcaaaagagatacctgtgcattactctttttttcccctctggctttcagcacggccttctgaggctttaacaagaggtaataaggacttagcaagcagttctcctaaccaatacattaattcacttgaaagtcatacttttaaaaaaatcagtagtgtatatgttgaggaaaaaaagcatgttcactctggaacaaagttggccctctatggctctcagatgcctaatgctctacagttttgtgagagaattgttaactgtaaagctgtaaaggcggttattggt

SEQ ID NO: 2028 - DNA, 484 bp, Homo sapien
  misc_feature (1)...(484): n = A,T,C or G
gctctcttaggaatacagtttctagcattaaacaaataaacaaggggagaaaataaaactcaaggagtgaaaatcaggaggtgtaataaaatgttcctcacattcccccccgctttttttttttttttttgactttgccttggagagccanagcttccgcattttctttactattctttttaaaaaaagtttcactgtgtagagaacatatatgcataaacataggtcaattatatgtctccattanaaaaataataattggaaaacatgttctagaactagttacaaaaataatttaaggtgaaatctctaatatttataaaagtancaaaataaatgcataattaaaatatatttggacataacagacttggaagcagatgatacagacttntttttttcataatcaggttagtgtaagaaattgccatttgaaacaatccattttgtaactgaaccttatgaaatatatgtatttcatggt

SEQ ID NO: 2029 - DNA, 476 bp, Homo sapien
gcccagcagccaccacagcgcctgcttcctcggccctgaaatcatgcccctaggtctcctgtggctgggcctagccctgttgggggctctgcatgcccaggcccaggactccacctcagacctgatcccagccccacctctgagcaaggtccctctgcagcagaacttccaggacaaccaattccaggggaagtggtatgtggtaggcctggcagggaatgcaattctcagagaagacaaagacccgcaaaagatgtatgccaccatctatgagctgaaagaagacaagagctacaatgtcacctccgtcctgtttaggaaaaagaagtgtgactactggatcaggacttttgttccaggttgccagcccggcgagttcacgctgggcaacattaagagttaccctggattaacgagttacctcgtccgagtggtgagcaccaactacaaccagcatgctatggtgttcttcaaga

SEQ ID NO: 2030 - DNA, 467 bp, Homo sapien
acttcttttgctaccaaatttttaagaaaagggagaaatccctcataactaaaatcctaaaaaatgataagtgcttcaaggagattaaagtgtcaggtattacaaaagggagagaaaagaaaggaggaagagatagtatgaattcccaggctccctgtggaaaatgaaaaccagttgttttgtagcagcaatgcctaggctgtcgtattttaaaatctgctgttgggtctgcatgtgtctgagagggcaggttttgatatttgttgaaatgacaggactacgaaaggccttaaacctcgaccttgacgaaaaaaaagacaatttgtgaccttgacttttgacagctcatgaattggccttagctggattagtagatcaagggcgccacctcgcgttgacaagcctccttgtaattcttcaaccaagggaatcaagagctcttacctccttgactttagagattcagt

SEQ ID NO: 2031 - DNA, 257 bp, Homo sapien
actatagggtaaatacgggccctatttcaaagatttttaggggaattaattctaggacgatgggcatgaaactgtggtttgctccacagatttcagagcattgaccgtagtatacccccggtcgcgtagcggtgaaagtggtttggtttagacgtccgggaattgcatctgtttttaagcctaatgtggggacagctcatgagtgcaagacgtcttgtgatgtaattattatacgaatgggggcttcaatcgggagt

SEQ ID NO: 2032 - DNA, 115 bp, Homo sapien
cagcttcactccatcaaacacggctgggagttcgggagtctccagcatggcattcatcttgatcaatgttacttattcttcccactgcaaatacgaattttccttgaagagttgt

SEQ ID NO: 2033 - DNA, 374 bp, Homo sapien
acaaacatgctcagaacttgctgggacagtgtgggtgggagaccagggctttgcaattcgtggcatcctttaggataagagggctgctattagattgtgggtaagtagatcttttgccttgcaaattgctgcctgggtgaatgctgcttgttctctcacccctaaccctagtagttcctccactaactttctcactaagtgagaatgagaactgctgtgatagggagagtgaaggagggatatgtggtagagcacttgatttcagttgaatgcctgctggtagcttttccattctgtggagctgccgttcctaataattccaggtttggtagcgtggaggagaactttgatggaaagagaaccttcccttctgt

SEQ ID NO: 2034 - DNA, 265 bp, Homo sapien
  misc_feature (1)...(265): n = A,T,C or G
acttctatttcctcnnggatgagaaagatagtcaaggagaaaacatgtttctgcgctgcgtgagtgagcttgtgattgaaagccgagagttcgatatgattcttgggaaactagagaatgacggaagtagaaagcctggagtcatagataagtttactagtgacacaaagcctattatcaacaaagttgcttctgtggcagaaaataaaggactgtttgaagaggcagcaaagctgtatgaccttgccaagaatgctgacaaggt

SEQ ID NO: 2035 - DNA, 259 bp, Homo sapien
  misc_feature (1)...(259): n = A,T,C or G
accaaatctttgggnnncattggcaaataatttcagtgtggtgtattattaaatagaaaaaaaaaaattttgtttcctaggttgaaggtctaattgatacgtttgacttatggtgaccatttatgcactttcaaatgaatttgctttcaaaataaatgaagagcagcntgtccttctttcctcttttaantgttcagctgtggcatgctcanaggttcctgctggattccagctggancggtgtgatacccttcttttt

SEQ ID NO: 2036 - DNA, 264 bp, Homo sapien
actcccggaacatgggggtgcaggcctgctttagggccacagctactgcagcaatggcatgattgtgggggcccccctgcagggatgggaacacggcaaagttgattcggtcctcaaatgtgtaagggatctcccggccagtcttggggtccacagccttcacccctttccggtagaagatgagccctgacctggcccctcgaagagtcttgtgagtagtggtggtgacgatgtccgcgtgcttgaaaggcgagggaatcacct

SEQ ID NO: 2037 - DNA, 161 bp, Homo sapien
actttggcctctctgggatagaagttattcagcaggcacacaacagaggcagttccagatttcaactgctcatcagatggcgggaagatgaagacagatggtgcagccacagttcgtttgatctccaccttggtcccttggccgaacgtccacggaggggt

SEQ ID NO: 2038 - DNA, 224 bp, Homo sapien
  misc_feature (1)...(224): n = A,T,C or G
ctcctgattcntggtgctgctgtctctgtccttctacaggaggnnntaccgctttgcctactacaagctgcttaagaaggcagatgaggggttagcatcgctgantgaggacggaagatcacccatctccatccgccagatggcctatgtttctggtctctccttcggtatcatcagnngtgtcttctctgntatcaatattttggctgatgcacttgggccag

SEQ ID NO: 2039 - DNA, 463 bp, Homo sapien
  misc_feature (1)...(463): n = A,T,C or G
actttggcctctctgggatagaagttattcagcaggcacacaacagaggcagttccagatttcaactgctcatcagatggcgggaagatgaagacagatggtgcagccacagttcgtttgatttccaccttggtcccttggccgaacgtccagggactactgtaactctgttgacagtagtaagttgcataatcttcaggttgcagactggtgattatgagagtgaaatatgtcccagatccactgccactgaaccttgatgggacccctctttgcaaactggatgcaccatagatcaggagcttaggggctttccctgctttctgctgataccaatttaaataggtgctaatgctctgacttgcccggcaagtgatggtgactctgtctcctacagatgcanacagggaggatggagactgggtcatctgnatgtcacatctggcacctcggagccagagta

SEQ ID NO: 2040 - DNA, 558 bp, Homo sapien
  misc_feature (1)...(558): n = A,T,C or G
ctttgggnnctagnttaattttttttttgcaacatatcccactcagaaacattcaggtttgaagccagccctgataatgaaggatgaactagtgtgatttctaatcctcccttttttgatttagttggatgtgcttttaaatgtcctttgcctgcatgaggtggaaaggggacctttttgagttgtcattttgcactttcaaaacttattttcttggaaaacaatatttatagggcttaaagcccattttcatttctaatctaaattatgtgtgcctatctgaaaactttgggctctttcttgtttctttcccaaaattcagaagttaatgggcttttatgtttttctatattntttttatttcaatgatttggcctgtctatgttaggctaaaaaataaccttgtgtatgctaccaacttaaagtgcattattttgtgtcactttttttttcttgtaaaaatgacttggattgaaaatatgtggtagcctttttatttctacattaagttctacctaggatatttncaaggactgccacaaaacccatatgtgcagt

SEQ ID NO: 2041 - DNA, 276 bp, Homo sapien
  misc_feature (1)...(276): n = A,T,C or G
acacaggaggcaaagtgtttcacatcatagacttcacttccaactccttggaatgttcatttctttggcttacaggagagactagacaggaaggccaggcaatgcttanncaactaaaatgaggttgggggtaatgctaacgtcaccctcacagggatggccacggggactgttattcgcaagctggttttctagacctgttagctggaagcatggtgagcaccatttctggacgctcaggccgtgtcgggcttcagtcatctccaccacacaggt

SEQ ID NO: 2042 - DNA, 241 bp, Homo sapien
ccgcgccgccacaatggtgcgcatgaatgtcctggcagatgctctcaagagtatcaacaatgccgaaaagagaggcaaacgccaggtgcttattaggccgtgctccaaagtcatcgtccggtttctcactgtgatgatgaagcatgtgtggggtgatcagccccagatttgacgtgcaactcaaagacctggaaaaatggcagaataatctgcttccatcccgccagtttggtttcattgt

SEQ ID NO: 2043 - DNA, 539 bp, Homo sapien
actattctgtgtcattcagtaaagaggcgaagtattatcagctgagatgttccggtcctggtctgcccctctatactctacacagcagcgtgaatgataaagggctgagagtcctggaagacaattcagctttggataaaatgctgcagaatgtccagatgccctccaaaaaactggacttcattattttgaatgaaacaaattttggtatcagatgatcttgcctcctcattttgataaatccaagagatatcctctactattagatgtgtatgcaggcccatgtagtcaaaaagcagacactgtcttcagactgaactgggccacttaccttgcaagcacagaaaacattatagtagctagctttgatggcagaggaagtggttaccaaggagataagatcatgcatgcaatcaacagaagactgggaacatttgaagttgaagatcaaattgaagcagccagacaattttcaaaaatgggatttgtggacaacaaaacgaattgcaatttggggctggtcatatggagggtacctg

SEQ ID NO: 2044 - DNA, 486 bp, Homo sapien
acactcccagggaagtcagagtaagcctgtttccaccgcagcacagcagtgagcacagctaggcagaattccaacagagcgcaaatcagcatcagagagagagttccagccagactggcttttggctgtatagcagtccgtggtataaagtgaatcatgataaaagtaagaaacataacttcttgttggtatattatttttgtccaactcacactgcagtgaggcaggatttaaggtggcctgtttgacagacaggataatgaaacccaccagggcagacagagcactcagaatgcttccaaccaggctgctatgcaccaaaagcttggttaaccttttctctgtggcgattgatagagagccagagatgataaaaaaaaagggtcctatgaatgggtaagcagagttcaacagtgtagaagtcacttgggtaaaatttggagagaaggaagcagatgccaaaatgatccccaagctcaataccat

SEQ ID NO: 2045 - DNA, 420 bp, Homo sapien; identical to SEQ ID NO: 1848

SEQ ID NO: 2046 - DNA, 291 bp, Homo sapien
acatttgttcggcgcaggtgccactgaccacaaagtcatcagtcaccatggggcagccgatgaggtctagagagcaaatgaagggcttaaaggtcttcgggtccaacccggcaatgactggctcagtgtagtaagggccaaaccgtttctcatacaagaggttggccaccatgctcatgagggtataaggtttgatctgccgaccttccttcaactcatacaggttcagccggaacttgaggcgctgggcaactgtctggacgtcagtggcgagcccggccagaccgatgt

SEQ ID NO: 2047 - DNA, 309 bp, Homo sapien
cccgatccgccagcaccacctgaggatccagaaaccgccccagcgatggaagaggatcaggagctggagagaaaaatatctggattgaagacctcaatggctgaaggcgagaggaagacagccctggaaatggtccaggcagctggaacagatagacactgtgtgacatttgtattgcacgaggaagaccataccctaggaaattctctacgttacatgatcatgaagaacccggaagtggaattttgtggttacactacgacccatccttcagagagcaaaattaatttacgcattcagactcgaggt

SEQ ID NO: 2048 - DNA, 555 bp, Homo sapien
acattcttctcagcaccttagagcccactgatgcaggcatactgggaacgactaaggactcacccaagctgggtctgctcatggtgcttcttagcatcatcttcatgaatggaaatcggtccagtgaggctgtcatctgggaggtgctgcgcaagttggggctgcgccctgggtatgattgggctctctcagcgcttgctgtccgtgttgtcctttggcaagagaggacggtcctaggattgcatcagtctggtggtctggtggagcgggtggggtgctggactgggtagagggcccagggttctgacctgggtggatgatgggcgaatggtcctgaactctctgctccctctctcagtgtctcttgggcttctatggagcttccctcttgtgctggaaacctcttttccatcttggaaatgcctctgcccacatctgggaagtgccatagccttgagtgaatttatttgtttatttatttttctttttcttctctcaggatacatcattcactctttggggacgtgaagaagctcatcactgatgagtttgtga

SEQ ID NO: 2049 - DNA, 279 bp, Homo sapien
acacgacaaagtcttcatttcaaaccattcactcagtttccatggtaacattgcgggcttccttggctaccataagtcgcattagttgactgtggaatttctcaatcttctttacatcttgagcttggtctgttttatacaccaaacaaactaaatcatctgttactttaacacacaagttcccatcagaatgcctatatttgagaaccacacgtgccttcatagggtcagcgaggtaaagcttctcggcagcgcggctgagctcctcccaggtctggt

SEQ ID NO: 2050 - DNA, 356 bp, Homo sapien
  misc_feature (1)...(356): n = A,T,C or G
acggtagaactgctattattcatcctatgtgggtaattgaggagtatgctaagattttgcgtagctgggtttggtttaatccacctcaactgcctgctatgatggataagattganagagtgaggagaaggcttacgtttagtgagggagagatttggtnnatgattgagatgggggctagtttttgtcatgtgagaagaagcannccggatgtcagaggggtgccttgggtaacctctgggactcagaagtgaaagggggctattcctagttttattgctatagccattatgattattaatgatgagtattgattggtagtattggttatggttcattgtccggagagtatattg

SEQ ID NO: 2051 - DNA, 101 bp, Homo sapien
  misc_feature (1)...(101): n = A,T,C or G
acctgataaaactttaaccagggaagcattaaacacagtgcagcagcttttgcccnngcttntaagttcctgccggcagcatttatcaatgtaanaactaa

SEQ ID NO: 2052 - DNA, 207 bp, Homo sapien; identical to SEQ ID NO: 1896

SEQ ID NO: 2053 - DNA, 216 bp, Homo sapien
  misc_feature (1)...(216): n = A,T,C or G
acttctcagaacgtggggatgctgtggccaaggcctccaaggagactcatgtaatggattaccgggccttggtgcatgagcgagatgaggcagcctatggggagctcanggccatggtgctggacctgagggccttctatgctgagctttatcatatcatcagcagcaacctggagaaaattgtcaacccaaagggtgaagaaaagccatctatgt

SEQ ID NO: 2054 - DNA, 373 bp, Homo sapien
cgcagagggacaaaaatcaaccggaattgaaaactactcaacggccgcagaacggggtcgatccactgccgctggctgccggctgccggcggggagcgagggtggcggtgtcgggtccgggcagcgggaaggcctcggtctcttggttccttcttggagctgctgcggggccgcgggcgggcgggtcggtctcggctgcttcaccgggttattttataaaagaggaagaaaaaaaataaaagtctccggcgggggagacgcggattttttgtaaatttttttggggttttttaaaagatttttttagattttttttggattttttaataataaatgtgtgttccgagcccggagcacacactccgcactctcg

SEQ ID NO: 2055 - DNA, 241 bp, Homo sapien
acctgcaagaaacctactcaaagcaggtcaccagccaggagccctgacccaggctgcccagcctgtccttgtgtcgtctttttaatttttccttagatggtctgtcctttttgtgatttctgtataggactctttatcttgagctgtggtatttttgttttgtttttgtcttttaaattaagcctcggttgagcccttgtatattaaataaatgcatttttgtccttttttaaaaaaaaaa

SEQ ID NO: 2056 - DNA, 596 bp, Homo sapien
  misc_feature (1)...(596): n = A,T,C or G
cttttctgtattttactatgagattcttaataacccagagcttgcctgcacgctggctaaaacggcttttgatgaggccattgctgaacttgatacactgaatgaagactcatacaaagacagcaccctcatcatgcagttgcttagagacaacctaacactttggacatcagacagtgcaggagaagaatgtgatgcggcagaaggggctgaaaactaaatccatacagggtgtcatccttctttccttcaagaaacctttttacacatctccattccttattccacttggatttcctatagcaaagaaacccattcatgtgtatggaatcaactgtttatagtcttttcacactgcagctttgggaaaacttcattccttgatttgtgtttgtcttggccttcctggtgtgcagtacctgcccgggcggccgcccgggcaggtacttgtgccaggaatataaatcaacacattgcttcctttatcaaagnaagtcttgttatttaaaaaaagtcaactgagccagtatgattagtgatgtaattgattttcattctggcacaagcctctttcattctggacagctcacaaatag

SEQ ID NO: 2057 - DNA, 523 bp, Homo sapien
actttgcctacggcagcaacctgctgacagagaggatccacctccgaaacccctcggcggcgttcttctgtgtggcccgcctgcaggattttaagcttgactttggcaattcccaaggcaaaacaagtcaaacttggcatggagggatagccaccatttttcagagtcctggcgatgaagtgtggggagtagtatggaaaatgaacaaaagcaatttaaattctctggatgagcaagaaggggttaaaagtggaatgtatgttgtaatagaagttaaagttgcaactcaagaaggaaaagaaataacctgtcgaagttatctgatgacaaattacgaaagtgctcccccatccccacagtataaaaagattatttgcatgggtgcaaaagaaaatggtttgccgctggagtatcaagagaagttaaaagcaatagaaccaaatgactatacaggaaaggtctcagaagaaattgaagacatcatcaaaaagggggaaacacaaactctttagaacataacaga

SEQ ID NO: 2058 - DNA, 183 bp, Homo sapien
  misc_feature (1)...(183): n = A,T,C or G
acatacgtgaanagttaccaccagtcctgccacctttggacagctnnaacaccatncccagcatccagtcagacctagtaaagaaaaccttggattcttaacccaagataggctgtaaatcactagctttttttcctcatgaaaaaaaatagagtnaaanaatatttnctctcttttctatat

SEQ ID NO: 2059 - DNA, 315 bp, Homo sapien
accaatttttagaaacatattgtcttctcagattgaagtggagggtccagaaatgcaacacccagcattctttaaagaaaataatagctagaatctttctgatacagattccaatatagattccattattcaaagtcctccacaaattactgggaaaatgtaagaggtaacttcacaaaaatcacatattgagtggaataattataactgatatataaataaggatttactaaaaaaaagcctcaaggggtgatattttaaatcaaggttttaaatacaaaaggtgtcttgtgttgcttaatcatacagtttcgt

SEQ ID NO: 2060 - DNA, 218 bp, Homo sapien
  misc_feature (1)...(218): n = A,T,C or G
acttgaatggaaggcggatgaacaccttgcaggccatctggatgatggaccccaaggatgtccgtgagtggcaacatgaggagttctaccgctacgtngcgcaggctcacgacaagccccgctacaccctgcactataagacggacgcaccgntcaacatnngcagcatcttctacgtgcccnacatgaaaccgtccatgtttgatgtgagccgggag

SEQ ID NO: 2061 - DNA, 284 bp, Homo sapien
acatgtatttaacattttaccagtttctgcttctaaatttaatatagtaattccaaccaaaaaaatagtatctctgtaacattttatctatgtccactgcaagctgcagagtctctgttgccaagatttcttgacacatttaatgttttacctaaaattgtggtcagattgagcaatatcattatcctaaattatgtttaaattatctaaaaatatccaaagcagttttcttggaagaaaaaaaatattactcaaatccaaagcattatcacacatatccttgt

SEQ ID NO: 2062 - DNA, 308 bp, Homo sapien
acaggtctctgtaaaaagtccttgctgtctcagcagccaatcaacttatagtttatttttttctgggtttttgttttgttttgttttctttctaatcgaggtgtgaaaaagttctaggttcagttgaagttctgatgaagaaacacaattgagattttttcagtgataaaatctgcatatttgtatttcaacaatgtagctaaaacttgatgtaaattcctcctttttttccttttttggcttaatgaatatcatttattcagtatgaaatctttatactatatgttccacgtgttaagaataaatgt

SEQ ID NO: 2063 - DNA, 172 bp, Homo sapien
  misc_feature (1)...(172): n = A,T,C or G
aagtgtgactactggatcaggacttttgttccaggttgccagcccggcgagttcacgctgggcaacattaagagttaccctggattaacgagttacctcgtccgagtggtgagcaccaactacaaccancatgctatggtgttcttcaagaaagtttctcaaaacagggagt

SEQ ID NO: 2064 - DNA, 240 bp, Homo sapien
acagagtgaggctgagtctacaccttcagtcttcatcatcaggagggatacctaattcttcatctgtccactgggaaggatcaggatacggaaagtgacccagcacctcttctgagtcatgccaaaagcgccagagaatccagaaccacatgagtccgctgaagaactcgctctggaacacctgggatctggtcagctgggggaactgtctataccggggctcaatgtgcacaccaccac

SEQ ID NO: 2065 - DNA, 375 bp, Homo sapien; identical to SEQ ID NO: 1222

SEQ ID NO: 2066 - DNA, 297 bp, Homo sapien
  misc_feature (1)...(297): n = A,T,C or G
acaaattctgagctgtctaacccctctgaaacggaatctgagcgtaaagacgagctgagtgattgatcattggcaggagaagatgatcgagacagccgacatcagcgtgacagcaggagacgcccaggaggaagaggcanaagtgtttcagggggtcgaggtcgtggtggaccacgtggtggcaaatcctccatcagttctgtgctcaaagatccagacagcaatccatacagcttacttgataatacagaatcagatcagactgcanacactgatgccagcgaatctcatcacagt

SEQ ID NO: 2067 - DNA, 240 bp, Homo sapien
aaacttgtgagcttactgcagtcagtcacagaggctgttctttttcacacaccccttcatgcccggctttccccatatccacatgcagagggcgagctcataaaactacagggaagcgtgaaatgatggctttggtagctgtttactgggtaaccccactgtgacactgtccttttcatgtgatgtggaaacctacttctgtcctccaaaccatgaaatgtgtcatctagactgcagagt

SEQ ID NO: 2068 - DNA, 419 bp, Homo sapien
  misc_feature (1)...(419): n = A,T,C or G
actggccttggtaaaggaatgacaactcttctgtccagcctaggtgctcagtgcgtgatagccagccggaagatggatgttttgaaagctaccgcagaacaaatttcttctcaaactggaaataaggttcatgcaattcantgtgatgtgagggatcctgatatggttcaaaacactgtgtcagaactgatcaaagttgcaggacatcctaatattgtgataaacaatgcagcagggaattttatttctcctactgaaagactttctcctaatgcttggaaaaccataactgacatagttctaaatggcacagccttcgtgacactagaaattggaaaacaactaattaaagcacagaaaggagcagcatttctttctattactactatctatgctgagactggttcaggttttgtagt

SEQ ID NO: 2069 - DNA, 259 bp, Homo sapien
acgtgggtgaggggatggaggaaggcgagttttcagaggcccgtgaagatatggctgcccttgagaaggattatgaggaggttggtgtggattctgttgaaggagagggtgaggaagaaggagaggaatactaattatccattccttttggccctgcagcatgtcatgctcccagaatttcagcttcagcttaactgacagacgttaaagctttctggttagattgttttcacttggtgatcatgtcttttccatgtgt

SEQ ID NO: 2070 - DNA, 356 bp, Homo sapien
acgcacaaactctattcaaaatgagaagttgtttgccaactctcatttcctaggataacacacatcacactgtttaagagtgggggaaagaatagtcatactgttagagcacaatgtttcctgaaaagaaactgatcaaaacgtttgaagcctttttagttgcctcaaagtgtgacagccactcaatactgctcctaacagtctgctttcagataacgtcataaaataaaataactgtgtgaaaagccatggccttcaaaaaactttatttggttatgagccaagctctgataggaaaagcccacctacgaaaaaaaggtgtgggtatttaagctggtctgattcacagagcttgt

SEQ ID NO: 2071 - DNA, 233 bp, Homo sapien
actagtgttgtaactttccaagtaaaagtatcccctaaaggccacttcctatctgatttttcccagcaaatgaggcaggcaattctaagatcttccacaaaacatctagccatctaaaatggagagatgaatcattctacctatacaaacaagctagctattagagggtggttggggtatgctactcataagatttcagggtgtcttccaactgaaatctcaatgttctcagt

SEQ ID NO: 2072 - DNA, 341 bp, Homo sapien
acttggcacttcagtttcaaacacgtagtcctttaaaacttgatccgatagctttaatgcggccggtcctctctcagtcaggaaaattgcacagaccgacagtcgtgaggatggcagagctgctgcattcccccacacggggatttctgtgtctgcttggcgacctccctgcgtgcacggcctaggaggtgcacgggccaccatagtcacactggcactgaaaagaaagcgttgccctggtgattctttcccccccgtttgtaatgttaactgatcaggaagcgcagtttgggtgggatgccgaatcgtcgtgctgacattgagtcacggatgaggaaggt

SEQ ID NO: 2073 - DNA, 517 bp, Homo sapien
  misc_feature (1)...(517): n = A,T,C or G
acaaataaagtgcatttttaaatagctctatttaactttggtggatgaagcttcaaactttatattaaggcacctggaattctcccccccttctttttcaaacaccaggaaaatgcattcacaaaatttatagttacacggacagaattttagtttatctaatgtaattttagcccatttaggtcaaacataaactcaattttcaaagtaacattgtttggaaaacattttcaacagactaattttacagaacattttttttctgtagactaattcatgaacgaagatcaatgaccaatattagtgttacttactctgtcattagcaatttcaaacagtatgatgattcatatactgagcttttgaaaaatcccacaagtttgagaaatagttacacagtatttttgtaaggaattttttgtctaatcttgtgtcaagttgatgtcactaatataccaatcaattaagtncataatctctgataaactatggttgacaaatcacatgaagtacctgc

SEQ ID NO: 2074 - DNA, 298 bp, Homo sapien
acttcatataagtggaatcatatagtatttgtccttttctgtctggcttatttcacatataatgtcttccaggttcatcatattgtagcacatgtcagaatttcattcctttttaaggctgaataatattccattatgtgtataccacattttgtttatccattcatccatcaatagacatttgggtatttccaggacaatatattcttaatttaatcccacattttaagacttacaggtaatttaaattcaattcaacttactgagtatttactaagggtaactcactatgggaagt

SEQ ID NO: 2075 - DNA, 483 bp, Homo sapien
acaacagcggtggtggccctgatacgagagaagcagttgattgtagccaacgcaggagactctcgctgtgtggtatctgaggctggcaaagctttagacatgtcctatgatcacaaaccagaggatgaagtagaactagcacgcatcaagaatgctggtggcaaggtcaccatggatgggcgagtcaacgggggcctcaacctctccagagccattggggaccacttctacaagagaaacaagaacctgccacctgaggaacagatgatttcagcccttcctgacatcaaggtgctgactctcactgacgaccatgaattcatggtcattgcctgtgatggcatctggaatgtgatgagcagccaggaagttgtagatttcattcaatcaaagatcagccagcgtgatgaaaatggggagcttcggttattgtcatccattgtggaagagctgctggatcagtgcctggcaccagacacttct

SEQ ID NO: 2076 - DNA, 276 bp, Homo sapien
acctctcaacattaccaaaatcatttctttagagggaaggaataatcattcaaatgaactttaaaaaagcaaatttcatgcactgattaaaataggattattttaaatacaaaaggcattttatatgaattataaactgaagagcttaaagatagttacaaaatacaaaagttcaacctcttacaataagctaaacgcaatgtcatttttaaaaagaaggacttagggtgtcgttttcacatatgacaatgttgcatttatgatgcagtttcaagt

SEQ ID NO: 2077 - DNA, 308 bp, Homo sapien
  misc_feature (1)...(308): n = A,T,C or G
acatttattcttaacacgtggaacatatagtataaagatttcatactgaataaatgatattcattaanccaaaaaaggaaaaaaaggaggaatttacatcaagttttagctacattgttgaaatacaaatatgcagattttatcactgaaaaaatctcaattgtgtttcttcatcagaacttcaactgaacctagaactttttcacacctcgattagaaagaaaacaaaacaaaacaaaaacccagaaaaaaataaactataagttgattggctgctgagacggcaaggactttttacagagacctgt

SEQ ID NO: 2078 - DNA, 334 bp, Homo sapien
  misc_feature (1)...(334): n = A,T,C or G
acacagttagtgggagcacactatataaatcctttgnatgacaccattcaacaatattttttaaaatctacaaaattttaaagtttcacttccctancaaaatatcttcagtcaagaaattagtctttgaaaattatgaaaattgttgtgggaaatatttatacaaattattactgataatgcacatatattttgaaacattgtttctagaagcaataaaatataacctatttaggagataacccaaatgatttgtaaaaaaattaacttgtagaaaagggaaggatgttgtgtaaaatcaagtcaattatttgaggtttttataatattgagt

SEQ ID NO: 2079 - DNA, 426 bp, Homo sapien
  misc_feature (1)...(426): n = A,T,C or G
acaggaatggaaggagcattcactgcaggaggcctcagcacatcactcggtggtgataaagccactcnnccagtcagggatggaggagggggcccccctgccagcatcaggaccagacctctgggcatggctgatcccagctctggaatctgaagggatgacagggactttcacctctgctggtttgaagtctctaagcagttctgaggcgggcagtcttctcctgggagaagtcctcagaaacctttggaaagggaagaagctacgctaggccacagtgcataccacgaatgagaacaatggcagcggctgccgacaactctggatctaacacaaagacagatgacaaggggcagtgtcctgccaaggaatccactttacttcttttgagactggtttttacacatggtaaggatttgcttcagt

SEQ ID NO: 2080 - DNA, 554 bp, Homo sapien
  misc_feature (1)...(554): n = A,T,C or G
acatgccaaattataaataggtgctactggccttgagcatatcactgtgggacagttccccaattgtcaagtgtttagatatgtagactattgccatttgtttttttgttttggttttgctttgtgtctgaagctgaattgatttctttttttgaatgtgaaagttgaatttcaaacgtagtcatttcttacagatggccaagacagaaaattgtggctaggttgactgagaactgttgtcttccatgtattaacacaattaagctttttatattccactctctgtgctgaccctggctgaggcattttgggagacaaggactctgaatcttctgcttccattaaagaagaactgtgatattcaacattggatttctgagaataaagataggatgattcctttgaactttgacttacttgtataaaatgtccagctaggtttaggtttttgccattnnctatatactttgggtaaagctacatttgatgagcaatgtnaatgtttctgagaatgtncattcctgttttctcttaagagaatgtgctgtgtacct

SEQ ID NO: 2081 - DNA, 227 bp, Homo sapien
  misc_feature (1)...(227): n = A,T,C or G
acctgtgtgtatagaaatagattagagcacagttgaaattcatggaactggcattatttaagcaactggaattnnacactgtaggaaggttttgaaaattgtttggttgtagattttatcttatcctttagtgttgtgttcctactgtgatgtcttggtttttgtcatagacttaagtttataagtttgaactggacttgttcgattataaccacaaattgtgtgtg

SEQ ID NO: 2082 - DNA, 488 bp, Homo sapien
  misc_feature (1)...(488): n = A,T,C or G
cagcagccaccacagcgcctgcttcctcggccctgaaatcatgcccctaggtctcctgtggctgggcctanncctgttgggggctctgcatgcccaggcccaggactccacctcagacctgatcccagccccacctctgagcaaggtccctctgcagcagaacttccaggacaaccaattccaggggaagtggtatgtggtaggcctggcagggaatgcaattctcagagaagacaaagacccgcaaaagatgtatgccaccatctatgagctgaaagaagacaagagctacaatgtcacctccgtcctgtttaggaaaaagaagtgtgactactggatcaggacttttgttccaggttgccagcccggcgagttcacgccgggcaacattaagagttaccctggattaacgagttacctcgtccgagtggtgagcaccaactacaaccagcatgctatggtgttcttcaagaaagtttctcaaaaca

SEQ ID NO: 2083 - DNA, 120 bp, Homo sapien
  misc_feature (1)...(120): n = A,T,C or G
ggaagggggggcacgaangctcatcattcaaaatanaacaaantaaanaagtattaaggcgaanattaaaaaaattttgcattacataatttacacgaaagcaatgctatcacctcccct

SEQ ID NO: 2084 - DNA, 279 bp, Homo sapien
actgaccgccgcctgaatgtgtgggatttaagtaaaattggggaagaacaatcagcagaagatgcagaagatgggcctccagaactcctgtttattcatggaggacacactgctaagatttcagattttagctggaaccccaatgagccttgggtcatttgctcagtgtctgaggataacatcatgcagatatggcaaatggctgaaaatatttacaatgatgaagagtcagatgtcacgacatccgaactggagggacaaggatcttaaacccaaagt

SEQ ID NO: 2085 - DNA, 359 bp, Homo sapien
acattataacctgtatggtattttatttaaaggagataaacagccaaatagcaaataggtcactgaatgataagatttgcaccttagaacaataatcattttaaggataacaagtaaatgtctgaaagcatgaggggctttatttgcctttacctcatatgagtctttgatcttgaaccgatacttttggatctcattgttgatatacctgaatttactttgtaagagattttaacttcacttcatgctgatgatgtatcaaattcattttatagaaagatttaaagtttttttctggaagtgatatatgtcaaattacatttcctactgcagtatttgagcagggacagtcatttttt

SEQ ID NO: 2086 - DNA, 175 bp, Homo sapien
gcagcgcagaggaaaggcggcttttagccaggtatttcagtgtctgtagacaagatggaatcatctccatttaatagacggcaatggacctcactatcattgagggtaacagccaaagaactttctcttgtcaacaagaacaagtcatcggctattgtggaaatattctccaagt

SEQ ID NO: 2087 - DNA, 332 bp, Homo sapien
  misc_feature (1)...(332): n = A,T,C or G
acaaagtaaaataaataaataaatacacattttggcctattagcaaagattaagaaatgataacattaaatactcaataaatcaccatgagatggggactcaaacttctggtaaaaatacaaatagatataatttttcttgaaggcaatttagtagtctgtttatcctataattctacttgtaagatcctatcatatgaaaataaccagagatacaaagacattctgcaaagatatgttttatattgttatttattgnnacaaaaggaaataaaaagcctaaatgttcagaaaattattttaaaagatgaaagagggaaataggccatggac

SEQ ID NO: 2088 - DNA, 113 bp, Homo sapien
acagcacaagaatgaacaatgggctattctttgaaaactcaaaacaaatgatttacacaaagacatatctataacataaaggtgaatggaccatgttattcttattcttaagt

SEQ ID NO: 2089 - DNA, 267 bp, Homo sapien
  misc_feature (1)...(267): n = A,T,C or G
acttgtatacaagtaacattttatntaccataaaaatgtgnnacttctacaaaacccacaaacagtgaaaagacantctggtaaatccaaggtttgtnaaaactatncacaaaacccacagtatttgggaaaagaggcaaggtttatacaagtancagntttaaaaatgtaactttgtnctactatcaattacacattaacatacacacactaattgaaaatatgctacaaccatgttntggaaaagcagnttaacattttctaaat

SEQ ID NO: 2090 - DNA, 293 bp, Homo sapien
attttagattgaaaaatatttagttgtctcattacctcttctaaacacaaaccagctgatgtattttaatctgtttctgttctatcttgtaattaatttggtgggttctacttgttttaacataaataaagagtatgcagcacgtttaataaaatcagaactcttaattggcttatgcccaggtctaggctgagaagtcctttttcttcttcccacctttatttccttagtttctgtccaccttaatcgaaacaacacatggttatgtctttttcctgctacaactacagggt

SEQ ID NO: 2091 - DNA, 538 bp, Homo sapien
acactatgctgtatttggtgctatacctgcaggcccgcttcacttggcgaggagcccgcctgctccggcccctcctgcagttcaccttgatcatgatggccttctacacgggactgtctcgcgtatcagaccacaagcaccatcccagtgatgttctggcaggatttgctcaaggagccctggtggcctgctgcatagttttcttcgtgtctgacctcttcaagactaagacgacgctctccctgcctgccctctgctatccggaaggaaatcctttcacctgtggacattattgacaggaacaatcaccacaacatgatgtaggtgccacccacctcctgagctgtttttgtaaaatgactgctgacagcaagttcttgctgctctccaatctcatcagacagtagaatgtagggaaaaacttttgcccgactgatttttaaaaaggaaaaaaaaaatgttttactatgtggccttccaaaataggtagtgtttgcctatgtggaaacaacagcaaactaacaccaagtgccagagt

SEQ ID NO: 2092 - DNA, 498 bp, Homo sapien
  misc_feature (1)...(498): n = A,T,C or G
actcatgcccgactgtctaccaggcacacagactttgaggagagggcgtatgtcgtcttgatccgcatcaatgatgggggtcggccacccttggaaggcattgtttctttaccagttacattctgcagttgtgtggaaggaagttgtttccggccagcaggtcaccagactgggatacccactgtgggcatggcagttggtatactgctgaccacccttctggtgattggtataattttagcagttgtgtttatccgcataaagaaggataaaggcaaagataatgttgaaagtgctcaagcatctgaagtcaaacctctgagaagctgaatttgaaaaggaatgtttgaatttatatagcaagtgctatttcagcaacaaccatctcatcctattacttttcatctaacgtgcattataattttttaaacagatattccctcttgtcctttaatatttgctaaatatttcttttttgangtggagtcttgctctgtc

SEQ ID NO: 2093 - DNA, 243 bp, Homo sapien
gtctcctgcagcgtctggggtttccgttgcagtcctcggaaccaggacctcggcgtggcctagcgagttatggcgacgaaggccgtgtgcgtgctgaagggcgacggcccagtgcagggcatcatcaatttcgagcagaaggaaagtaatggaccagtgaaggtgtggggaagcattaaaggactgactgaaggcctgcatggattccatgttcatgagtttggagataatacagcaggctgt

SEQ ID NO: 2094 - DNA, 193 bp, Homo sapien
  misc_feature (1)...(193): n = A,T,C or G
ggtagaggttnntctattttaacatttctgaaatcatatagatttacatgattgttctcacgtaacctgtaacataagcatttcccaagttgctattatctgttaataacagtggtttgattaattggattggctgtgtggatgtggaacggaagagccttgatgtcaagaagagctgaagcacagaaggtgc

SEQ ID NO: 2095 - DNA, 340 bp, Homo sapien
caataattgaggagcagcccaaaaactatcaagtttggcatcataggcgagtattagtggaatggctaagagatccatctcaggagcttgaatttattgctgatattcttaatcaggatgcaaagaattatcatgcctggcagcatcgacaatgggttattcaggaatttaaactttgggataatgagctgcagtatgtggaccaacttctgaaagaggatgtgagaaataactctgtctggaaccaaagatacttcgttatttctaacaccactggctacaatgatcgtgctgtattggagagagaagtccaatacactctggaaatgattaaactagt

SEQ ID NO: 2096 - DNA, 306 bp, Homo sapien
acaggtggtcattacagaccctgaaaaactggaccaaattagacagagagaatcagatatcaccaaggagagaattcagaagatcctggcaactggtgccaatgttattctaaccactggtggaattgatgatatgtgtctgaagtattttgtggaggctggtgctatggcagttagaagagttttaaaaagggaccttaaacgcattgccaaagcttctggagcaactattctgtcaaccctggccaatttggaaggtgaagaaacttttgaagctgcaatgttgggacaggcagaagaagtggt

SEQ ID NO: 2097 - DNA, 324 bp, Homo sapien
ggaagagcaaccgagatgaaggtgaagatgctgagccggaatccggacaattatgtccgcgaaaccaagttggacttacagagagttccaagaaactatgatcctgctttacatccttttgaggtcccacgagaatatataagagctttaaatgctaccaaactggaacgagtatttgcaaaaccattccttgcttcgctggatggtcaccgtgatggagtcaattgcttggcaaagcatccagagaagctggctactgtcctttctggggcgtgtgatggagaggttagaatttggaatctaactcagcggaattgtatccgt

SEQ ID NO: 2098 - DNA, 432 bp, Homo sapien
acactccagcgaagccgaggcccggccaacgctcgtgaagtttccacagagaagagcctgcaaaactcccactggaagaggagaaataaaggccatggaaagaaaccccagggaagagacaggcctcgttcacagaccctaggcagggaataaaaaattcaagtcattcacagaagtcttgaaaggcatgaggatttctgacagttcctagaaaaaggcaacattttctttatctttgtatccattggccaagaacgccgacatgtgagacttgcttcaccagccgccaccgcttccttacaatctcccgcactgctggagcgggctgggtaactacaggactgtgctctgtgtgataagatttggtgattccactttataagaaaggaaactgctttaattaaagcaggttaataattaaaacttcaaagt

SEQ ID NO: 2099 - DNA, 506 bp, Homo sapien
actcaacaacttcaattcatttttttctggttcaagatgagtaggagcctaataaggctgtgataaaagggcaaaaggcactgagagccaaaagcggattaatgagctcctccatttatttgtcttcctaacagctgaactgttacaactattgacactcttcaaaaaggttccgctctgaaccctgtccaggcactgcaggctccaatggacatcttcaaatccagagaatggaggggcaagagcttcccctgtgtgatgccaaaaccaacaaagccccatggatcaggtaatgaaacttcagcttttccccctttgagatttatttactggcagctgacaaagggcaaattcagctcgaattgtgcagtcaaggccctgtcaagcttttagaggcacccttgtcttgaagcaccttcatgactggcatttcactcaaaagccctcggcactggtccttaacagcttatgacatcacaaaggacactccagacagatgcctacat

SEQ ID NO: 2100 - DNA, 550 bp, Homo sapien
  misc_feature (1)...(550): n = A,T,C or G
acagtatattttaaattaagaaaagtgaactatatgtatttgttttatacatttaaggcttagactcataaataatgctattgtttatgatttgaaaactttcaggcaaaatccaatttacatttttcccttccctagcaattacttttttccagcttcaactcttcttagttactaatactttgttgactttaaaaatgaaatcattcacaaacttttggtatatgatggagaatgaaaaactagagtcagacagctttaattgacattgtcaacacctccagttatcaggaatacatttttttactgccttaacctgtagtgcgtagaatatgcatcaatttcttgaaggagattcatgtttttataagaattttcatgtaattattgcaattgtggtcaaataaggaacgtttcctgcttgaaattatattgatttaaatgatgtgtgagatgtttcaccattttcaggcactgtgtaattctattgnaaataaactggcaggtatctttgtaactataaaatagtgcatgctcagccatgtacctg

SEQ ID NO: 2101 - DNA, 365 bp, Homo sapien
  misc_feature (1)...(365): n = A,T,C or G
gttacatgtctttattacataaacatcataatatttctcataggagttggtcttcagtttgcttgttgctttcgcagaatgtcaaatatctatagaaaatgtctaattatttatgaacaaacattcccatccctgccccgcaaaaaatctcattgcctgcaattcctaaccagattcctgagaaaaataataggatttattttatagcatcatacatagattttctttcaagatataaaaaaggacagacttctaaaacatgaatctcctttngtttacaaagttctataaaaatacattaagtatgttcaaatgtttgttctttcactttatattccagtttaccagaaacaaaaaatggcagt

SEQ ID NO: 2102 - DNA, 182 bp, Homo sapien
acagggaggaatttgaagtagatagaaaccgacctggattactccggtctgaactcagatcacgtaggactttaatcgttgaacaaacgaacctttaatagcggctgcaccatcgggatgtcctgatccaacatcgaggtcgtaaaccctattgttgatatggactctagaataggattgcg

SEQ ID NO: 2103 - DNA, 281 bp, Homo sapien
acctccgaatcaattaccgccaattcttcacagcacctgccactgtctccctggtgggagtcaccgtcttcttcagcttcctagtatttgggatgtatggacgataaggacataggaagaaaatgaaaggcatggtctttctcctttatggcctccccacttttcctggccagagctgggcccaagggccggggagggaggggtggaaaggatgtgatggaaatctcctccataggacacaggaggcaagtatgcggcctccccttctcatccacaggagt

SEQ ID NO: 2104 - DNA, 255 bp, Homo sapien
  misc_feature (1)...(255): n = A,T,C or G
acctgcgatgnttacgtccacaccgagcccagtgtgggactgacatttctcaatggaagtgaaatttgggattggactttgaagacggattactaaataataattattatatgtaactgaagcaacctacttttgaaaatcaactgtattgggtagtgggaggtgggagggaagggctttgggaaggggatgaatatctntttttacctttaacagacttgnttaatcttctcgatgtaggatgtttatgtaggt

SEQ ID NO: 2105 - DNA, 143 bp, Homo sapien
  misc_feature (1)...(143): n = A,T,C or G
ttttttttttttnnttttttttttttttagaggaaaacccggtaatgatgtcggggttgagggataggagganaatgggggataggtgtatgaacatgagggtgttttctcgtgtgaatgagggttttatgttgttaatgtgg

SEQ ID NO: 2106 - DNA, 397 bp, Homo sapien
ggtgatcagggctgaacagagagaactcaccatggactttgggctgagctggcttcttcttgtggctattttaaaaggtgtccagtgtgaggtgcagctgttggagtctgggggaggcgtggtccagcctgggaggtccctgagactctcctgtgcagcctctggattcaccttcagtaactatggcatgcactgggtccgccaggctccaggcaaggggctggagtgggtggcagttatatcatatgatggaagtaataaatactatgcagactccgtgaagggccgattcaccatctccagagacaattccaagaacacgctgtatctgcaaatgaacagcctgagagctgaggacacggctgtctattactgtgcgaaaaggccgaatcggggt

SEQ ID NO: 2107 - DNA, 515 bp, Homo sapien
acctctatgtttaaagaaagaagaaaaaaacccagaatttggttgtagaaaacaatgcccacaacagactggccagtgcttagacaaatttggggttggggggaacactttggtttgaaagcacagagcagtttgccatgtttcttctgtgcctaccattctcccttggcctcaacttctgtaagatgggggggggacaaaaagagaagtaaagttaagaagaaagtggaaaattaaaaaaaaagatgtcaaagtttttacatgcatatatttcagcttatgctgaagacctacctgtatgttgcacattgaatcatactttcagaacccctcagaaaccatccctctctccctaaagaattttaaaaggaaaacaaaacctcgagtatagatcttacagatgagcaagcattcaggccttagccaaagaatgcagtggagccttcccccttcaactgcattgtgaatgaataccaattaacagcataaaaattaatagtcccatatcagatctg

SEQ ID NO: 2108 - DNA, 88 bp, Homo sapien
  misc_feature (1)...(88): n = A,T,C or G
acaagctttttttttttttttttttttttttttcgnaaanatggggtttnaccgngttagtcaggatggngtcggtctcctgacctcg

SEQ ID NO: 2109 - DNA, 499 bp, Homo sapien
  misc_feature (1)...(499): n = A,T,C or G
accctccagaaattggtgactttgcttttgtgactgacaacacttatactaagcaccaaatcagacagatggaaatgaagattctaagagctttaaactttggtctgggtcggcctctacctttgcacttccttcggagagcatctaagattggagaggttgatgtcgagcaacatactttggccaaatacctgatggaactaactatgttggactatgacatggtgcactttcctccttctcaaattgcagcaggagctttttgcttagcactgaaaattctggataatggtgaatggacaccaactctacaacattacctgtcatatactgaagaatcttttcttccagttatgcagcacctggctaagaatgtagtcatggtaaatcaaggacttacaaagcacatgactgncaagaacaagtatgccacatcgaagcatgctaagatcagcactctaccacagctgaattctgcactagttcaagatttagccaa

SEQ ID NO: 2110 - DNA, 100 bp, Homo sapien
acttcaactaccatgtgaaacacatccttatctgcataaattggaatatcatgaaatggagatatatattgtcctttctcatttttgaggaagactcggt

SEQ ID NO: 2111 - DNA, 200 bp, Homo sapien
acacctcggagcagtcgggcagcaggagggccggaagcctggttggtttgtatatgacctctcttgcccttgtgcactttccttgatttagcaaccttgacctgcactggccctcacagctgttggagggaagtagcctcttgcagggaaatattttcccctgccctggaatctcctatgtgcctgttaaagattccagg

SEQ ID NO: 2112 - DNA, 523 bp, Homo sapien
  misc_feature (1)...(523): n = A,T,C or G
cgtggacgccgccgaagaagcatcgttaaagtctctcttcaccctgccgtcatgtctaagtcagagtctcctaaagagcccgaacagctgaggaagctcttcattggagggttgagctttgaaacaactgatgagagcctgaggagccattttgagcaatggggaacgctcacggactgtgtggtaatgagagatccaaacaccaagcgctccaggggctttgggtttgtcacatatgccactgtggaggaggtggatgcagctatgaatgcaaggccacacaaggtggatggaagagttgtggaaccaaagagagctgtctccagagaagattctcaaagaccaggtgcccacttaactgtgaaaaagatatttgttggtggcattaaagaagacactgaagaacatcacctaagagattattttgaacagtatggaaaaattgaagtgattgaaatcatgactgaccgangcagtggcaagaaaangggctttgcctttgtaacctttgacgaccatgact

SEQ ID NO: 2113 - DNA, 295 bp, Homo sapien
acagtcagaatattcctgttcctactacagttcctgttcctgtgccagttcctgtttttctgcctgctccattggacagcagtgagaagattcctgcagcaattgaggagctaaaaagcaaggtttcttcagatgctcttgatacagagttgcttacaatgacggatatgatgagtgaagacgaggggaaaacagagacaaccaacatcaacagtgtaattattgaaacagatataattggttcagaccttttgaagaactctgacccagagacacagtccagcatgcctgatgt

SEQ ID NO: 2114 - DNA, 160 bp, Homo sapien
  misc_feature (1)...(160): n = A,T,C or G
acctgctgtantcacgagggacgggcggcggcctggtcggcagagagtagcctgcaacattcggccgtggttacgatgagtttacccctcaatcccaaacctttcctcaatggactaacaggaaagccagtgatggtgaaacttaagtggggaatggagt

SEQ ID NO: 2115 - DNA, 183 bp, Homo sapien
acgcatcatgtggtctcagcgtgatccatcacttcgcaaaagtggagtaggcaacatattcattaaaaatctggacaaatccattgataataaagcactgtatgatacattttctgcttttggtaacatcctttcatgtaaggtggtttgtggtgaaaatggttccaagggctatggatttgt

SEQ ID NO: 2116 - DNA, 306 bp, Homo sapien
acgacatctcagacatgacttctattgccaggctggtcaagtggcagggtcatgagggagacatcgataagggtgctccttatgctccctgctctggaatccaccagcgggctatctgcgtttatggggctggggacttgaattggatgcttcaaaaccatcacctgttggccaacaagtttgacccaaaggtagatgataatgctcttcagtgcttagaagaatacctacgttataaggccatctatgggactgaactttgagacacactatgagagcgttgctacctgtggggcaagagcatgt

SEQ ID NO: 2117 - DNA, 132 bp, Homo sapien
  misc_feature (1)...(132): n = A,T,C or G
acagggcctgcntgaactcaacggaaatnancccatggagatcaaagtcctgggtccttatacctttancatctgtgacacctncaacttctccgactacatccgtggaggcatcgnnagtcaggtcaaagt

SEQ ID NO: 2118 - DNA, 191 bp, Homo sapien
acaattaaacattttcaaaaggtgtaatttatttaaaattgtctcattttggtaaaatttatgtgaacttttaaagctaaatattaaacttaatatgctatgtaaatatatacatatatacatttaatgatgtatttttttaaaacattggcttgcttttgttaaagtgcaagtgttacatatggctttgt

SEQ ID NO: 2119 - DNA, 359 bp, Homo sapien
accatcaagctcaaggtgtttctgtcaggaatgccagagctgcggctgggcctcaatgaccgcgtgctcttcgagctcactggccgcagcaagaacaaatcagtagagctggaggatgtaaaattccaccagtgcgtgcggctctctcgctttgacaacgaccgcaccatctccttcatcccgcctgatggtgactttgagctcatgtcataccgcctcagcacccaggtcaagccactgatctggattgagtctgtcattgagaagttctcccacagccgcgtggagatcatggtcaaggccaaggggcagtttaagaaacagtcagtggccaacggtgtggagatatctgtgcctgt

SEQ ID NO: 2120 - DNA, 361 bp, Homo sapien
  misc_feature (1)...(361): n = A,T,C or G
actaccttaccctagagtaaatcactgggaaatacaggcagaaaacagacatcctgcctgtgaaaacaattgcatattcaaactggagagagtcatagcacgtatgcttttaaaagtaagtttcgaaaaactgttttatcagttttgttttttttttttttttggagcatgtcttttctaaataattctcacttatcattccagaaaatataacaaacagtttgtaagaactcatgcaaaaatgtttctctaaggccataaattggtttgctaagttgcattgttttattcaagtaaaaagcccttctanagaacaaggagtctgtaaagaaaaccaatcaccttcaactnttgggcctgt

SEQ ID NO: 2121 - DNA, 82 bp, Homo sapien
  misc_feature (1)...(82): n = A,T,C or G
acttttatgttactgnctgtaaagagggatttaaaatgtgtattttaaacacagcagttgagctgagtgcattttctatagt

SEQ ID NO: 2122 - DNA, 287 bp, Homo sapien
accttcagatgggcactcagaagagtaagcccttagttaatgtttaaagatgtttaaagatgtctgagactcataggtcaaagtcagatttcagttccaccttattagacctgcactgctaaggagctgctttaggtaaggctgtgttcctagtcaccagggtgttcaaacacagtgctgggggcaatgtgggaatagccttcttttatttaggaagtaatgtgaagtcagtttcatgaatagatcttactttaagcattcattgaggtttttggcaagaatagagt

SEQ ID NO: 2123 - DNA, 335 bp, Homo sapien
accacttgcagtcaaatgaattccttcgaaatgtatttgaacttggacccccagtgatgcttgatgctgcaacgcttaaaacgatgaagatttctcgtttcgaaaggcatttatataactctgcagccttcaaagctcgaaccaaagctagaagcaaatgtcgagataagagagcagatgttggagaattcttctagattttcagaacttgaagactattttctaatttctattttttttctatttcaatgtatttaaactctagacacagtttttatcctggattaacttagataacttttgtagcagtggttatattgcttataatttaatgt

SEQ ID NO: 2124 - DNA, 513 bp, Homo sapien
acgaggtggctcgactgctcaacctcaccgagaggcaggtcaagatctggttccagaaccgcaggatgaaaatgaagaaaatcaacaaagaccgagcaaaagacgagtgatgccatttgggcttatttagaaaaaagggtaagctagagagaaaaagaaagaactgtccgtcccccttccgccttctcccttttctcacccccaccctagcctccaccatccccgcacaaagcggctctaaacctcaggccacatcttttccaaggcaaaccctgttcaggctggctcgtaggcctgccgctttgatggaggaggtattgtaagctttccattttctataagaaaaaggaaaagttgaggggggggcattagtgctgatagctgtgtgtgttagcttgtatatatatttttaaaaatctacctgttcctgacttaaaacaaaaggaaagaaactacctttttataatgcacaactgttgatggtaggctgtatagtttttagtctgtgtagtt

SEQ ID NO: 2125 - DNA, 287 bp, Homo sapien
accccccaacacacacaaattgggaatgaaatatgtaattatagccatctttatatgaaatatccaaacaacaaatatatttaataatataaagatagtgccaaaatcaacaaaaactaagaatactgaggcttaactgaccccgattcgtatgattttgaaataaaatgttcagactttctagctttatcttaatttgcctttgcttcactgctttatgtagttacaatgtaaatctaagagatgcttaaaacagattaaaataatattgttaaaaaacatttttc

SEQ ID NO: 2126 - DNA, 244 bp, Homo sapien
acaaaaatggttataaaatggttgaagcaactagaagcgtgacaggtataatacatataaatacagccaaaattcaattcaatgcaaagttgaatgacatcatattgcaccaaaatttattccatacaaaagcacatgcatcaagagtttccataagatgaaaacaaacacacttacttcatagcatcttaccacttacttacacaaatagcccataaacaccatctggcattgtgattgcagt

SEQ ID NO: 2127 - DNA, 389 bp, Homo sapien; identical to SEQ ID NO: 1865

SEQ ID NO: 2128 - DNA, 173 bp, Homo sapien
acacaaagaccatcgagacggccattcttgtttacaaaacacttaccaagaaagcactttgtaggggaactttagtaagttcttctcatttcattatgtttcttccaaggaaacaggagagactgaattaataattctctctttcctcttaagcacttttaaaataataaagt

SEQ ID NO: 2129 - DNA, 257 bp, Homo sapien; identical to SEQ ID NO: 1118

SEQ ID NO: 2130 - DNA, 408 bp, Homo sapien
cgccctcctctgaggagcttcaagccaacaaggccacactggtgtgtctcataagtgacttctacccgggagccgtgacagtggcctggaaggcagatagcagccccgtcaaggcgggagtggagaccaccacaccctccaaacaaagcaacaacaagtaccctttgactcttagccagattaggatcttgatgagaacaagaggcattgattgttcttgaaagcatcattccaggtttgttgaaagtgggatactgaggtgagaaggggccagttagcacgcaccagagacaaagcttgggccttcaggggagtatgggttcttggctctgttagtatgtagaaggatttgtagcattttaaattgatgaacttgatctgggtcttcaaaaatatttttaggttagt

SEQ ID NO: 2131 - DNA, 541 bp, Homo sapien
  misc_feature (1)...(541): n = A,T,C or G
acacttgaaaccaaatttctaaaacttgtttttcttaaaaaatagttgttgtaacattaaaccataacctaatcagtgtgttcactatgcttccacactagccagtcttctcacacttcttctggtttcaagtctcaaggcctgacagacagaagggcttggagattttttttctttacaattcagtcttcagcaacttgagagctttcttcatgttgtcaagcaacagagctgtatctgcaggttcgtaagcatagagacgatttgaatatcttccagtgatatcggctctaactgtcagagatgggtcaacaaacataatcctggggacatactggccatcaggagaaaggtgtttgtcagttgtttcataaaccagattgaggaggacaaactgctctgccaatttctggatttctttattttcagcaaacactttctttaaagcttgactgtgtgggcactcatccaagtgatgaataatcatcaanggtttgttgcttgtcttggatttatatagagcttcttcatatgtctgagt

SEQ ID NO: 2132 - DNA, 176 bp, Homo sapien
acaccccgttagtccctgatcccaaccttctccctcctgccagcacaccgatgcacacaccggaagtggcgagcccaagccctggggacaggtgtagggagaaaagcagccccaggcctcagactcgcttcccatcctggcatagagtgggggatggctggagggtgtctataggt

SEQ ID NO: 2133 - DNA, 443 bp, Homo sapien
actgaggctgctaaagctgccagtcacaacccagcatgtcaactggttcctcatgctctgtttggtgtggaaattcacatgtgccctgacactgaggaagcaattgcttaaaatcactttccaataacagctgataaaatattttgcaggtttgtcatgcaaggtttatttattaggtggctattcaaagtttgtatagcaaccacttaagcagaactaaattaatattcactgagcactgtaacgatggaagagggcttttcctaagggttgggttgggagttgtgcttctgtgaaattaacatctctcactcattgccaagattctctgcttaaaaatattagttttctgtgctgttgccaaaatagcaatttaagcaaatgtagtgccagaatgacacatgagcctcggactcagggaacagttccactgactgtggagt

SEQ ID NO: 2134 - DNA, 325 bp, Homo sapien
  misc_feature (1)...(325): n = A,T,C or G
acaagcagttaatcacccaccatagggcatgattaacaaagcaacctttcccttcccccgagtgattttgcgaaacccccttttcccttcagcttgcttagatgttccaaatttagaaagcttaaggcggcctacagaaaaaggaaaaaaggccacaaaagttccctctcactttcagtaaaaataaataaaacagcagcagcaaacaaataaaatgaaataaaagaaacaaatgaaataaatattgtgttgtgcagcattaaaaaaaatcaaaataaaaattaaatgtgagcaaagaatnaaaaaaaaaaaaaaaaaaaaaaaa

SEQ ID NO: 2135 - DNA, 113 bp, Homo sapien
acaagaatgcaatggtttcatccattcagcaaacaaaaatacatgtctgttttatttttgcctaaattctgctataatttgaacaaaattctaaaacaaaagccacacagagt

SEQ ID NO: 2136 - DNA, 312 bp, Homo sapien
acttttcaattatgttaacgtaaaatactcgtaacgaatgtagtatgagtttaaagtgagcttttcagatcctataagtgcatcctaagtaatgacaggctttaagataaggaatatatgcattttgttaaggcagaaatctcataaaatttcatgaaaaaccatggtcaatccaatgatgcactttttaagacaagtttgtctggaaactggaagggtcaaaagacaacaaaaaagcacacaccaaaaaacctcactttaagcaaatctataacttgaaaaaaaaaagcctaagaatgttctgagagtggt

SEQ ID NO: 2137 - DNA, 393 bp, Homo sapien
actcagaaatcatctgttctacctctttatgaagtaagttctttcttacatctttgtgttccaaaataatttgtagaatttagaagtgtaattttgttatattgcattctagaatacttttcaggagctccaggtaatgaggcggagcctgaatttgtttagaacacaaatgatggatttagaattggcaatgctgcgtcagcaaaccatggtttatcatcatatgactgaggaggagaggtttgaagttgatcagctccagggtttgagaaattcagtccgaatggaacttcaggacctggaactgcagctggaggagcgcctgctgggcctggaggagcagcttcgtgctgtgcgcatgccttcacccttccgctcctccgcactcatggt

SEQ ID NO: 2138 - DNA, 498 bp, Homo sapien
  misc_feature (1)...(498): n = A,T,C or G
accacacaatactaacccttcccctcctctgatgtcttacatcacctcccaggagatgaagtgtattcttcactggtttgccaattggtcaggtccccagcgtgaacgtttcctagaggacctggtagctaaggcagtgccagaaaaattacaaccactgctggatagtctggagcagcttagtgtgtctggggcagaccgaccaccttctatctttgagtgccagctacatctttgggatcagtggtttcgaggctgggctgagcaggagcgcaatgaatttgtcagacagctggagttcagtgagccagacttcgtggcaaagttttaccaagcagtggctgctacagctggtaaggactgataggcattcagaccaaagaagataaccatagctgatggagccatgactctctacaatgataactcaattcaaatgtgttgcctaaagctctggaactggtattccaaccagctgaccgaactcantgaccaggt

SEQ ID NO: 2139 - DNA, 511 bp, Homo sapien
  misc_feature (1)...(511): n = A,T,C or G
acaaataaagtgcatttttaaatagccctatttaactttggtggatgaagcttcaaactttatattaaggcacctggaattctcccccccttctttttcaaacaccaggaaaatgcattcacaaaatttatagttacacggacagaattttagtttatctaatgtaattttagcccatttaggtcaaacataaactcaattttcaaagtaacattgtttggaaaacattttcaacagactaattttacagaacattttttttctgtagactaattcatgaacgaagatcaatgaccaatattagtgttacttactctgtcattagcaatttcaaacagtatgatgattcatatactgagcttttgaaaaatcccacaagtttgagaaatagttacacagtatttttgtaaggaattttttgnctaatcttgngtcaagttgatgtcactaatataccaatcaattaagtccatagtctctgataaactatggntgacaaatcacatgaagt

SEQ ID NO: 2140 - DNA, 377 bp, Homo sapien
tttacatcaagaattttggagaagacatggatgatgagcgccttaaggatctctttggcaagtttgggcctgccttaagtgtgaaagtaatgactgatgaaagtggaaaatccaaaagatttggatttgtaagctttgaaaggcatgaagatgcacagaaagctgtggatgagatgaacggaaaggagctcaatggaaaacaaatttatgttggtcgagctcagaaaaaggtggaacggcagacggaacttaagcgcaaatttgaacagatgaaacaagataggatcaccagataccagggtgttaatctttatgtgaaaaatcttgatgatggtattgatgatgaacgtctccggaaagagttttctccatttggt

SEQ ID NO: 2141 - DNA, 436 bp, Homo sapien
  misc_feature (1)...(436): n = A,T,C or G
acacacaanagcctctataccacccacttggcagaccatcatcttgttcttataattattgcaagtgaggttagaaagaattccagctgcacaggtgaccacatttatatcatctgaacccagaagctgaacaagagtcccaaggagaccttccatcccttcctgtttagttgcagcatctgaaagattcctgagagtccaaagacagttctgaacaagacgttgacttggatctgtcaggtgaagtcctaaagcttgcattccaccagcttctacaatagccggcttattactagagcagacagatagcaccttcagcactctgcttgtggtccatantagtttttcgtaagtataggtcctcattatatttactaaagcttggggtccaccactagccantatgatgagcttgctttcttggttgccataagct

SEQ ID NO: 2142 - DNA, 393 bp, Homo sapien
gtaaattctcccaggagctgttttactgtctacttttcaggattaaaaaaaaaatcaaaacttaaaaaaaaaaagtttaaaaagcaaaatggggagggggaggaagcagtgacttttttttggtaattatgcgcttttttttaatttttagaatttgtctttttactgtgggtgggctgttgatatttcatcaagataagcatttctttcctgagttcaggtgactgaggaagagccacaaaacaaaacacaacaaaaccaaaccacagaatcatctttaacccaactttttatacgatgccccagttccccataactttgcacacaagcttctgtgttcagttgaattgtaactgctttttgtatttggagagagtgactattgaacttgaa

SEQ ID NO: 2143 - DNA, 398 bp, Homo sapien
caggtgaaggaactgagcagttgaactctgagttcatcaattgtaatatttggaaattatctacaatggaatcttccctctgttctctgataacctacttgcttactcaatgcctttaagccaagtcaccctgttgcctatgggaggaggtggaaggatttggcaagctcaaccacatgctatttagttagcatcagttgtcgccaacagtctttctgcaaagggcaggagagctttgggggaaaggaaaaggcttaccaggctgctatggtcaactcttcagaaattttcagagcaatctaaaagcgccaaaattcgctatgtttacagtgatactattaagaaaatgaatgtgattctgctctgtctttttaagtatgatcaaataaaaaatttgt

SEQ ID NO: 2144 - DNA, 96 bp, Homo sapien
  misc_feature (1)...(96): n = A,T,C or G
actttaaggttngnngcacttacaaggctgtggtagaatcataccccatggataccacatattaaaccatgtatatctgtggaatactcaatgtgt

SEQ ID NO: 2145 - DNA, 557 bp, Homo sapien
acagtagaagctctgcaaaatcttaaaaatttgaaaagtcttgacctgtttaactgtgagatcacaaacctggaagattatagagaaagtatttttgaactactgcagcaaatcacatacttagatggatttgatcaggaggataatgaagcgccggactctgaagaggaggatgatgaggatggcgatgaagatgatgaagaggaagaggaaaatgaagctggtccaccggaaggatatgaggaagaggaggaggaagaggaagaggaggatgaggatgaggatgaagatgaagatgaagcaggttcagagttgggagagggagaagaggaagtgggcctctcatacttaatgaaagaagaaattcaggatgaagaagatgatgatgactatgttgaagaaggggaagaagaggaagaagaggaagaaggaggtcttcgaggggagaaggggaaacgagatgctgaagacgatggagaggaagaagatgactagatcattctaagaccagattctctaatgttttctgggtgtgcaatagagtgatcacatctttg

SEQ ID NO: 2146 - DNA, 434 bp, Homo sapien
acttgcatgtaggacaactcagttagaaaagtatagtgaatggatggaatctactgtatgataaaaatgctacaaacaccatttagttgccatcaataagaaatttacttgttttaaaaaaatccaaatgctggcattgtccagaaaaatttaacaggtttatttataattattataaagttgaaccgctgaaacttgttcactgaaacatttcattctcaaaaaaaaaaaaaatttctcttcttcctgttattggtagttctgaacgttagatattttttttccatggggtcaaaaggtaccagccaggctgatcaaaaagttctaattgaggacatcccccccttcccaaatttaaatcttgtatgctggaaaaataatttaatgtcagatgtaaacacaacactttcaactagaggagtggcagctggggt

SEQ ID NO: 2147 - DNA, 428 bp, Homo sapien
  misc_feature (1)...(428): n = A,T,C or G
gcttttttttttttttttttttttttttctttnaaaattatttttatgtttatttcacttgaacaaaanaaaaagcaactaataaaattgaaggaagagctgaactaccgaatatttttntttaactcaanaactttcagttacaggaagatttatctaatnttaaaatgactaaattacaaaaagcataaaatgtttgaagccatttttaaagttgttttgaaatccatattagcactcanacttccccactccctaacttttgttaattgctgtaatggacatttgttgttttgatctacccaacatcctttnatcctactttggtaactgatattctttgggggaactgatctttccactttacatnatgttttgnggaaatttttcaactaaggaacctgccctatgctanctaanagttgagt

SEQ ID NO: 2148 - DNA, 532 bp, Homo sapien
acctggggcagatccaacacatcctccgctgcggcgtcaggaaggacgaccgcacgggcaccggcaccctgtcggtattcggcatgcaggcgcgctacagcctgagagatgaattccctctgctgacaaccaaacgtgtgttctggaagggtgttttggaggagttgctgtggtttatcaagggatccacaaatgctaaagagctgtcttccaagggagtgaaaatctgggatgccaatggatcccgagactttttggacagcctgggattctccaccagagaagaaggggacttgggcccagtttatggcttccagtggaggcattttggggcagaatacagagatatggaatcagattattcaggacagggagttgaccaactgcaaagagtgattgacaccatcaaaaccaaccctgacgacagaagaatcatcatgtgcgcttggaatccaagagatcttcctctgatggcgctgcctccatgccatgccctctgccagttctatgtggtgaacagtgagctgtcctg

SEQ ID NO: 2149 - DNA, 458 bp, Homo sapien
  misc_feature (1)...(458): n = A,T,C or G
acattacaggaattgtatgttcacttcgaatcatgtttgaaaaaacgttgtatccttattttgtaattcatatagtaagagtattctaaacagcactacattaatatcatttgataggtataaagtatactttttcttgcactcttctctaggatttaatgcattgatcattcttaatgaacaatatcagctctaaaggaccaatgcttttataatgttttcaactgtatctgagtcagccagagagataaatatccatgtataaaatagatagaaaactttgcttggtaatttaaaattaataatgccagttttccaagagtgagaaaatcattgcactctatacagttttaagatatacttaaaatattcccatttgtatctatttttttttctactgntttttatttggacacttacataacaggtgcagagcacaatgctgtgtaacatangaa

SEQ ID NO: 2150 - DNA, 450 bp, Homo sapien
ataaggaatttcctcccaattcatggatatggccatcatctgattagtcattcagttgcagttctcttcaatgctggacacacggtttccaaggatcaaagtcttgaggagtgctagatcaggaaatgggagaagcaaggcaaggagaagagggcatcaggagttggaatttctgaaatgtgcatttatctcacagaaggcttggcacaatgaggctggggtgagtgtggttttagtgattgttctttgttgcctccttagctgcagcaatcagtggagtgaggctggagaggggcttggcaatcttcaggaattgatgctgtagcagctctttagctgaacctctcttctccacatccatctcgagacagcggttcagaaagtcccggaagatagctgacagcttctctgggttctgaagttctggggtcccattggtggcaatgaggt

SEQ ID NO: 2151 - DNA, 408 bp, Homo sapien
  misc_feature (1)...(408): n = A,T,C or G
actattgacccagcnatgggggcttcgacatgggctttagggagtcataagtggagtccgtaaagaggtatctttactataaaagctattgtgtaagctagtcatattaagttgttggctcaggagtttgatagttcttgggcagtgagagtgagtagtagaatgtttagtgagcctagggtgttgtgagtgtaaattagtgcgatgagtangggaagggagcctactagggtgtagaataggaagtatgtgcctgcgttcaggcgttctggctggttgcctcatcgggtgatgatagccaaggtggggataagtgtggtttcgaagaagatataaaatatgattagttctgtggctgtgaatgttataattaaggagattttgtagggagattagtatanagaggta

SEQ ID NO: 2152 - DNA, 424 bp, Homo sapien
  misc_feature (1)...(424): n = A,T,C or G
atttttatattatttatttattcttcgttagtttgtttttggagcgtgggttttgttttgttttttgatttttttctttttttcgacctacggatttattcttattgcccaggcttgagtgcagtggcgtgttctcagcttactcaacctccgcctcttgggtttgggtaattgttgtgcctcggcctccctctgcctcttgggcttgggcgattgttccacctcatccgccctccgcctcttgggtttcggtgattgttccacctcatccaccctccacctcttgggtttgggtggtttttccgcctcggcctcctgagtagctaagggaggagtcttgagattatcatccactgagggtggaagaggagagggtggaagagggacaaagagacagtccttcagattatcatncactgagggt

SEQ ID NO: 2153 - DNA, 204 bp, Homo sapien
  misc_feature (1)...(204): n = A,T,C or G
caaagactgccttcctgcaccaagtaaagaagtgactcttgaaatactgggtggaatttctttatccaacataggaccgatgcgctcgcagatttgcaaaagatgatcaggagccacatgcttattggacaagaccaactcctcgtagcnnctgttgtgctcgttgnnctcccagtccaatctcttcggnaacaactggtacct

SEQ ID NO: 2154 - DNA, 234 bp, Homo sapien
  misc_feature (1)...(234): n = A,T,C or G
acagctgtgtnntaaagatgccttctggtgaatttgcacgtatatgccgagatctcagccatattggagatgctgttgtaatttcctgtgcaaaagacggagtgaaattttctgcaagtggagaacttggaaatggaaacattaaattgtcacagacaagtaatgtcgataaagaggaggaagctgttaccatagagatgaatgaaccagttcaactaacttttgcactgaggt

SEQ ID NO: 2155 - DNA, 159 bp, Homo sapien
  misc_feature (1)...(159): n = A,T,C or G
tgaggnncccccctcagctcctggggctcctgctactctggctccgaggtgccagatgtggcatccagatgacccantctccatcctccctgtctgcatctgtaggagacagagtcaccatcacttgccgggcaagtccgaccattagcagctatttaa

SEQ ID NO: 2156 - DNA, 327 bp, Homo sapien
  misc_feature (1)...(327): n = A,T,C or G
acagattgnncacatatctagtctcatcaaactctccaaggccgacgtggaaaggaaattatcacagatgattcttgacaagaaatttcatgggattttggaccagggggagggtgtcctgattattttcgatgaacccccagtagataaaacttacgaagctgctctggaaacaattcanaacatgagcaaagtagtggattccctctacaacaaagccaanaaactgacatagagttggatctgtagcggtcctttgganagtgtgtgtggccgggagagtgaaaccttgggggaaaatgctangagattcttttttctttttgt

SEQ ID NO: 2157 - DNA, 62 bp, Homo sapien
cgttgccctgctgatttgctgatacgcccattattgatgtttcgcgcccctatcgagtttga

SEQ ID NO: 2158 - DNA, 341 bp, Homo sapien
acagggtttactctcagaaacctacctggaagcccatcggatcgtgaagatgaacaagagtgaggatgatgagtctggggctggagagctcaccagggaggagctgaggcaaattgcagaggaggatttctacgaaaagctggcagcttcaatcgccccagaaatatacgggcatgaagatgcgaagaaggcactgctgctcctgctagtcgggggtgtggaccagtctcctcgaggcatgaaaatccggggcaacatcaacatctgtctgatgggggatcctggtgtggccaagtctcagctcctgtcatacattgatcgactggcgcctcgcagccagt

SEQ ID NO: 2159 - DNA, 274 bp, Homo sapien
  misc_feature (1)...(274): n = A,T,C or G
accattcccagantttcaggggcatcgtgggtttggtctagtgattgaaaacacaagaacagagagatccagctgaaaaagagtgatcctcaatatcctaactaactggtcctcaactcaagcagagtttcttcactctggcactgtgatcatgaaacttagtagaggggattgtgtgtattttatacaaatttaatacaatgtcttacattgataaaattcttaaagagcaaaactgcattttatttctgcatccacattccaatcatattag

SEQ ID NO: 2160 - DNA, 585 bp, Homo sapien
  misc_feature (1)...(585): n = A,T,C or G
gctgcccaggccacttacagtggtctggagagccagtcagtgagtggctgttacggggccggctacagtgggcagaacagcatgggtggctatgactagttttgttaggaacatttgagttacttcaatcattttcacaggcagccaacaagcaattaagagcagttataatagaggaagctgggggacccattttgcaccatgagtttgtgaaaaatctggattaaaaaattacctcttcagtgttttctcatgcaaaattttcttctagcatgtgataatgagtaaactaaaactattttcagcttttctcaattaacattttggtagtatacttcagagtgatgttatctaagtttaagtagtttaagtatgttaaatgtggatcttttacaccacatcacagtgaacacactggggagacgtgcttttttggaaaactcaaaggtgctagctccctgattcaaagaaatatttctcatgtttgttcattctagtttatattttcatttaaaatcctttaggttaagtttaagcttttttaaaagttagttttgagaattgagacacantactaatactgta

SEQ ID NO: 2161 - DNA, 268 bp, Homo sapien
  misc_feature (1)...(268): n = A,T,C or G
actgccggctggtnaatggaacctcgcagtcatttatcatcagacctcangaagaaggtgaacgggctttgccatcaataccaaagttggccaacagcgaaaagcaaggnntgcggacacacgccgtctctgtgtcagaaacagatgattatgctgagattatanatgaagaagatacttacaccatgccctcaaccagggattatgagattcaaagagaaagaatagaacttggacgatgtattggagaaggccaatttggagatgt

SEQ ID NO: 2162 - DNA, 171 bp, Homo sapien
  misc_feature (1)...(171): n = A,T,C or G
acttcccctggantaaaaacaggaaatacaatttatgtttatacgtggttttagatatgactcaatatacatagattttaactttatggtttggtattacttttttaaaggagctcaatagaaattcaaatctcactttaagaccatgaatttcaagttgcaatgaagtgt

SEQ ID NO: 2163 - DNA, 223 bp, Homo sapien
  misc_feature (1)...(223): n = A,T,C or G
ttccnttaaaaactactacttgagaaagaaatctttccacaaatagcataaaactgnagaatgatgaaaggatttgggaaagctttacaaaagcttaattccaattgnntcttcctgagggcggnggcaaagggtatttccttccttctctgggatatccctgtctccctccacgatcatctcgttctgggtggatacccaccaggcccagctagcatctggt

SEQ ID NO: 2164 - DNA, 529 bp, Homo sapien
  misc_feature (1)...(529): n = A,T,C or G
acacacacatggggaacacgccacagcttanatgtgacaaagttccttctcatatgactgttccctcaaggtaagactaagatgggagggggagaaaaagaatcctaaaaaagccaatttttaaaaattctgntttggctgattttgtgctataatgggtagctgatttctaaaaatcatatttcttcaaagagttttatatcgaaaggaagactaaatgtaatgtgcctttccttataatccaggaaaacaactgtggtatttcaaaaattctaaaaatatntactttcatgaaatagtaactatttcactacaaacctatttttcactaaatacacacatttcctaatcctggagcctnctgggaaaagcagtgggttctccctgggtcttgcaagactccantgttcacaggagagtgtggggaatagcttcaccccgtctcctgggatgggctttgtcanaggtcacgtgcagagacgctatcagacttncaccangcatgtttaagcaattaccccatacttgt

SEQ ID NO: 2165 - DNA, 277 bp, Homo sapien
acaccaggggttggaaaaaccacactaggcaaagaacttgcgtcaaaatcaggactgaaatacattaatgtgggtgatttagctcgagaagagcaattgtatgatggctatgatgaagagtatgactgtcccattttagatgaagacagagtagttgatgagttagataaccaaatgagagaaggtggagttattgttgattaccatggttgtgatttcttccctgaacgctggtttcatatagtttttgtgctgagaacagataccaatgtattgt

SEQ ID NO: 2166 - DNA, 231 bp, Homo sapien
ctggcttgtgatcataatgccaactatagataaggcaagtagtagcctagtagttaactgaagtttcaagttagtcatgtatagtcagtttttattatcatgtgaataaaataaaattgttttccttttcttttcattcagaaaagttctaggaactattttggtgcacaaccacattatagattatgcttgggtgatatgccatttgtagctgggaaggtgagttggtca

SEQ ID NO: 2167 - DNA, 350 bp, Homo sapien
acagtaaaattaacacttccgttacaggaaatgtatgacgcaaataatataaaattaaaaggtgaaaaaaaggtgacactggtttcctaagatacaatttactctttacaaccagggtccacaggtccaggctgcagagcggcagcaggaagcagagcctcccacctgcttctgggggacctggtaataaaaatcagcccatgatggcgctatggcctctcagacaccacacgctgcctaaacacctagagctctggaaatagtcaacaggagagtgatttccatgggggaaattttaaataagatgcacatgggacaggcgatagaaagtttgccaagttaaatttggt

SEQ ID NO: 2168 - DNA, 406 bp, Homo sapien
ttcccaagtgttttcattcagtgatcaggactgaacacagaggactcaccatggagtttgggctgagctggattttccttgctgctattttaaatggtgtccagtgtgaggtgcagctggtggagtctgggggaggcttagtaaagcctggggggtccctaacactctcctgtgcagcctctggattcactttcagtgacgcctggatgagctgggtccgccaggctccagggaaggggctggagtgggttggccgtattaaaagcacaactgatggtgggacaacagactacgctgcacccgtgcaaggcagattcaccatctcaagagatgattcagaagacacgttgtttctgcaaatgagcagcctgaaaaccgaggacacagccgtgtattactgtacctg

SEQ ID NO: 2169 - DNA, 57 bp, Homo sapien
  misc_feature (1)...(57): n = A,T,C or G
gtacaagcttttnctttttttttttttttttttttcccttttttttttttttttttt

SEQ ID NO: 2170 - DNA, 320 bp, Homo sapien
accagctgaatagcccagcttgcagtatagttatgtttcagtctgcagtgtgtttagcattcccttgtcaaagtgcttgactgcatgctggaaactttgtatttttgaagcggcaaactctgttctctggaatgctctgaagttatggctgggacctatcccctcacatctaatgaatgaattataaaatgtatatgtctatgaagcttcggggtagtgcctgtaatcagaaaacaacttagaacccttttgtttgtttccaattgagtcattactgcctgccactaagaaacgtgcttgaatctaataagtatgtgtgt

SEQ ID NO: 2171 - DNA, 186 bp, Homo sapien
acagccgccttctaggccgtaacggaattcctgaaggttggagactccatagaagtggacaaaggctgctgccaccaccaggacatggaaaatctgatgagactggaaccatatgtcaaattttccaggaaagaagcgctcaggaattcgagcagcataaaaggccagctccagtgatgtacctcg

SEQ ID NO: 2172 - DNA, 275 bp, Homo sapien
  misc_feature (1)...(275): n = A,T,C or G
cagctatctaatgattgccctgacggtggtaggatgcatcttcatggttattgagggcaagaaggctgcccaaagacacgagactttaacaagcttgaacttanaaaagaaagctcgtctgaaagaggaagcagctatgaaggccaaaacagagtagcagaggtatccgtgttggctggattttgaaaatccaggaattatgttataacgtgcctgtattaaaaaggatgtggtatgaggatccatttcataaagtatgatttgcccaaacctgt

SEQ ID NO: 2173 - DNA, 565 bp, Homo sapien
acttgaaacctagagttgcgttttcacttgagaagacacactttggaaacacctatccaacagactacaaatataggctattaaattaaaaatctggtttcaaaataatacccacttaggttggaaatatctttctccaaactcagatccaacttttgaattgtttggtatcaaaggcaaagttagagggacttgggtttaaaaactaaaattacaagtgagtgcttaaaaaaaaacaactcaaaacatctttttatcaaataagggacacacacacacaaaaggcaaacgatgatatctacatgcttggactgggagagcagctcccaggctcccctggagggatgttctctcaaacctcagtaaactgagtttgtcattgaactttgaacctggtagtgagctcagcaatctacctggtccaagtcccccattttagaggtgaagaaattgaagtccacagcgactttgtccagggtgaaaagcagagccagggcacagcccagatgctcagcccacccagagcccttctgagacatcacactgtggtcacacgacggcagct

SEQ ID NO: 2174 - DNA, 337 bp, Homo sapien
acaggttatcttcagtgtgtcttggcggatgagttgtgtcagtgctacaatggagttctcttgtccacggagagcagtgttgcagtgtatggaatgctaaatcttaccccaaagggcaagcaggctccaggtggccatgagctgagttgtgacttctgggaactaattgggttggcccctgctggaggagctgacaacctgatcaatgaggagtctgacgttgatgtccagctcaacaacagacacatgatgatccgaggagaaaacatgtccaaaatcctaaaagcacgatccatggtcaccaggtgctttagagatcacttctttgatagggggt

SEQ ID NO: 2175 - DNA, 224 bp, Homo sapien
acaacaaggggatcatgggtgaagacacctacccctaccagggcaaggatggttattgcaagttccaacctggaaaggccatcggctttgtcaaggatgtagccaacatcacaatctatgacgaggaagcgatggtggaggctgtggccctctacaaccctgtgagctttgcctttgaggtgactcaggacttcatgatgtatagaacgggcatctactccagt

SEQ ID NO: 2176 - DNA, 58 bp, Homo sapien
  misc_feature (1)...(58): n = A,T,C or G
actataaaaagatttggctacanatacaaaacatctttgcgataaaactgacaacgta

SEQ ID NO: 2177 - DNA, 222 bp, Homo sapien
acgaatttgggtcccagccttgttgggttgtcagccatggacatggatttcaacccctggagaaaacgatgtcattgttcagcagctgagagcccaggcgtccgcggcgacttgccgtctctccattccactgcctgttgcagagtttttctgtaactaagggggttgaggttattgtagacgttagattgcgggcaccgccagggattttgcagcgcttca

SEQ ID NO: 2178 - DNA, 244 bp, Homo sapien
  misc_feature (1)...(244): n = A,T,C or G
actgcaatcacaatgccanatggtgtttatgggctatttgtgtaagtaagtggtaagatgctatgaagtaagtgtgtttgttttcatcttatgaaaactcttgatgcatgtgcttttgtatggaataaattttggtgcaatatgatgtcattcaactttgcattgaattgaattttggttgtatttatatgtattatacctgtcacgcttctagttgcttcaaccattttataaccatttttgt

SEQ ID NO: 2179 - DNA, 264 bp, Homo sapien
accttgagctcctcaaagactcactcaacgagtatgcatatgcagcagagctagcgggcttgagctatgatctccaaaataccatctatgggatgtatctttcagtgaaaggttacaatgacaagcagccaattttactaaagaagattattgagaaaatggctacctttgagattgatgaaaaaagatttgaaattatcaaagaagcatatatgcgatctcttaacaatttccgggctgaacagcctcaccagcatgccatgt

SEQ ID NO: 2180 - DNA, 371 bp, Homo sapien
ttctgaatgtctgaagaaactgcaaaagtgcaattccaaaagccaaggtgagaaagaaatgtatacgctgggaatcactaattttcccattcctggagagcctggttttccacttaacgcaatttatgccaaacctgcaaacaaacaggaagatgaagtgatgagagcctatttacaacagctaaggcaagagactggactgagactttgtgagaaagttttcgaccctcagaatgataaacccagcaagtggtggacttgctttgtgaagagacagttcatgaacaagagtctttcaggacctggacagtgaagggagcccgggcagccaccgtctccagagccctgggcagcattttccagcaagatgt

SEQ ID NO: 2181 - DNA, 408 bp, Homo sapien
cacgcacaggctgaggccaggcatctggtatatgaatcagacaaaaacaaggatgagaagctaactaaagaggaaatattggagaactggaacatgtttgttggaagccaagctaccaattacggggaagatctcacaaaaaatcatgatgagctttgatagacactcaccagaatatggcagactgtcataggcattctgttattgtcttggattgttgctacaattgtctaatttacagcagttgtgatcccacaaaaagcaagtttatacctcagattggggtataaaaattgtttttcgctcagtatttactggaaaatggacatcactagtctttcagtaagatttctctcaaaacacgtgaaaaccttggtaaattgcaattctttctggggatatattggt

SEQ ID NO: 2182 - DNA, 329 bp, Homo sapien; identical to SEQ ID NO: 1146

SEQ ID NO: 2183 - DNA, 299 bp, Homo sapien
accctccctcacacttgggaagatctccatgaaaaagataagagcacgaactgctttggagataatgatcctattgatgtttgcgaaataggctcaaagattctttcttgtggagaagttattcatgtgaagatccttggaattttggctcttattgatgaaggtgaaacagattggaaattaattgctatcaatgcgaatgatcctgaagcctcaaagtttcatgatattgatgatgttaagaagttcaaaccgggttacctggaagctactcttaattggtttagattatataaggt

SEQ ID NO: 2184 - DNA, 602 bp, Homo sapien
  misc_feature (1)...(602): n = A,T,C or G
gtggagaaagcggctctgggtctagattgagggatactccccctttccaccatgggcaagaagggcaaagttggcaagagccgacgagacaagttttatcacttggcgaaggagacgggttaccgttcccgatctgctttcaagctgatccagctcaatcgccgctttcagttcctgcagaaagcccgagccttgctggacctgtgtgctgcgccagggggatggctgcaggtagctgccaagtttatgcctgtatccagccttattgtgggagtggacctggttccaatcaagcctctccccaatgtggtgactctccagcaggacatcacaacagaacgttgtaggcaggccctgaggaaggagctgaagacctggaaggttgatgttgtgctcaatgatggggcccccaacgttggggctagctgggtccatgatgcttactcacaagcccatttgacactgatggctctacgtttggcttgtgactttttggcccgtggtggcagcttcatcacaaangttttccgttctcgtgactatcancctctgctatggatctttcagcanctgttccgncgtgtncaggccaccaagcccca

SEQ ID NO: 2185 - DNA, 293 bp, Homo sapien
  misc_feature (1)...(293): n = A,T,C or G
aatcacttgcccatcatctctgcgggcagcgaactgtgtctacagcaacctgtggagcggaaactgtgatctgccctagcgctctcttccagaagatgccctccaatcctttccaccctattccctaactctcgggacctcgtttgggagtgttctgtgggcttggccttgtgtcagagctgggagtagcatggactctgggtttcatatccanctgagtgagagggtttgagtcaaaagcctgggtgagaatcctgcctctccccaaacattaatcaccaaagtattaatgt

SEQ ID NO: 2186 - DNA, 347 bp, Homo sapien
  misc_feature (1)...(347): n = A,T,C or G
acttttatatnatgattttttaaatgcccaaaggactagtttgaaagcttnttttaaaaagaattcctctaatatgactttatgtgagaagggataatacatgatcaaataaactcagttttttatggttactgtaaaaagactgngtaaggcagctcancaccatgcttctcgtaaaagcagcttcaattatccactggggttatcttttgacaacttgccattatntgatgttacacaattcaatancaancaagtttganacaatcgcannttaaaagcnngaaccatttaacannaagtggaataattnaagataaagcacttcttcccaaagggaattatca

SEQ ID NO: 2187 - DNA, 221 bp, Homo sapien
  misc_feature (1)...(221): n = A,T,C or G
cgatgtactaccaaatgannnagtttaaatgcttgtaacaaacgtgttatccaaaacagcacaatatgatgatgctaagacttacaaaattaacctaatttacagtattgtcaaacatgatttcatacaaacttgaataaacaccgnatntaaactaggtcaaacaactaccgagttcaaataattgatatggaagtattttggtaaagtgcccatagtga

SEQ ID NO: 2188 - DNA, 198 bp, Homo sapien
aactggctttaccaatcttgaaatttgaccacaagtgtcttatatatgcagatctaatgtaaaatccagaacttggactccatcgttaaaattatttatgtgtaacattcaaatgtgtgcattaaatatgcttccacagtaaaatctgaaaaactgatttgtgattgaaagctgcctttctatttacttgagtcttgt

SEQ ID NO: 2189 - DNA, 129 bp, Homo sapien
actggccggggtcggcctccatgttcaggttctcaatgtgtagctctgaccggccctgcgaggaactcacgaagaacctgttctcggagccgttcatgagggccttgtcctcagagtcagtgatcttgt

SEQ ID NO: 2190 - DNA, 473 bp, Homo sapien
  misc_feature (1)...(473): n = A,T,C or G
acacaatggtttattaaaggaatgtatggcccacatcaacctancaaggattctactggtaaaccttcctatggccaaaggaaaaacaagcaggagttgagtggctggggtggggtgcanncaatggagagagggcagaagggtgtanaagctgaaggggtctanaagcttactcctgagtttcttccttctgtcttcaaatctttacttcttatggccaaagacccanctgtttcatangctggagatgcactcttctanactgctcgagacagccananacaggggangagggaagaaggatactgtggaaagggatggcggggcaaacatttagagctagaagncactactgggccaatgctaaagtttctgtctctaagcctaaaaaagccagtgtagtagggcccttatcactcttantttgctaggtttnccctntgaaataatgagcagatttagccaggctngca

SEQ ID NO: 2191 - DNA, 334 bp, Homo sapien
  misc_feature (1)...(334): n = A,T,C or G
atctatggntgccatctgcagattcttaaaatacaagatgaggatttcctcacacacaacttagtgggaactttccatgttctgttaagcctttcggtgtttttttgatctgtgtncttttttttttaaatagcagnaatccaactttaaaaaaatgcagcactaaaaaaataactagtccttattnncatgcaggactaactgcaggcagcacatttgtatcttgcttaagttgttgactttggagtcaagtttttattacangtgtcatgattgccaatactgtnttntntaagtgaannatggntgctttgactttggatctaatcaagat

SEQ ID NO: 2192 - DNA, 163 bp, Homo sapien
  misc_feature (1)...(163): n = A,T,C or G
ntactggctgtggactntccagggacncctcctgcagaagaacaacaaggaccgcttctgccagctgctgtggcggccccggccncccacactcctgngccaggaacagatcaagcaaattaaaaaggatctgaanaaatactctaagatctttgaacagaag

SEQ ID NO: 2193 - DNA, 362 bp, Homo sapien
  misc_feature (1)...(362): n = A,T,C or G
ccagancnacctataacagaccaagacacgacatctagccctgaatctgcaggaaaaatccaagctggagagtgagctagccaactttgggcctcgcattaatgatatcaagaggatcattcagagccgagagagggaaatgaaagacttgaaggagaagatgaaccaggtagaggatgaggtgtttgaagagttttgtcgggagattggtgtgcgcaacatccgggagtttgaggaagaaaaggtgaaacggcagaatgaaatcgccaagaagcgtttggagtttgagaatcangaagactcgcttgggcattcagttggatttttgaaaagaaccaactgaaggaggaccaagatnaagt

SEQ ID NO: 2194 - DNA, 205 bp, Homo sapien
acccagtgcaggaagagtttccacaccagggggaattgtattctgcatggcaaaatccacacaggagagacaccctatctgtgcggccagtgtggaaaaagcttcacccagagagggagtctggctgtgcaccagcgaagctgctcacagaggctcaccctttgaccactttcctgaagagaagttctctttatgaattaagagt

SEQ ID NO: 2195 - DNA, 317 bp, Homo sapien
  misc_feature (1)...(317): n = A,T,C or G
acagtggaaancatctttcatgtttccttcattatacgggatggttttgcaagaataagacttgaccaagaccgactgccagtaatagagcctgttagtattaatgaagaaaatgagggatttgaacataacacacaagttagaaatcaaggaattatagctttgagttaccgtgactgggaggagattgtgaagacctttgagatttcagagcctgtgattactccaagtcagaggcagcagaagccaagtgcttgatgctagctgaaggactcaaatggatagtgaagtccaaaacggaaagcggcatgtattgt

SEQ ID NO: 2196 - DNA, 343 bp, Homo sapien
acaaccagaaaatagtgtgggatattgaattatgggaggctctgactgtctcgggtgtcagcttaacattccacagatggggggttagtttttatatcctataatacaaagcatattaaatggcaatatggagtcagtcctgcatttaatgtcttgaacattttaaattacttctattaccatgttgttttttagtagaattgtttcctaaagaaaaccactctttgatcatggctctctctgccagaattgtgtgcactctgtaacatctttgtggtagtcctgttttcctaataactttgttactgtgctgtgaaagattacagatttgaacatgtagtgt

SEQ ID NO: 2197 - DNA, 252 bp, Homo sapien
  misc_feature (1)...(252): n = A,T,C or G
cagagncnccaaanatnacactaatataatgtatgggaaggcgtaatataaaaggcctccaccaactgcctgaagcacggttaaaattgggaagaagtaaagtgcagcataaatacttttaaatcgatcagattcccctaacccacatgcaatcttcttcaccagaagaggtcggagcagcatcattaataccaagcagaatgcgtaatagataaatacaatggtatatagtgggtagacggcttcatgagt

SEQ ID NO: 2198 - DNA, 204 bp, Homo sapien
  misc_feature (1)...(204): n = A,T,C or G
actttaggaccntgacagacaaatcgattacaaggtcaattcccaggatttcttcagggtgtgttcaggagtgcagatgttctttggatgacctttctactaaattagacctctgaaggagaaagctacttgccagaggctttccctgagagcattaggttgggcaaaatctgactaaaatttaattactaaatgaaagtgtgt

SEQ ID NO: 2199 - DNA, 304 bp, Homo sapien
  misc_feature (1)...(304): n = A,T,C or G
gtaccttgtgaaacaatttgtttactgaataaaaaatattgcttaagatttaaagcaattaaagcaaaataagttgctgaagggagatcatatgagttaaatacaggcttttttttaatctgtaattgatttacatttgattttaagaagacactgtttacatnaggtcaccacnnagcagatttacatacaaccttcaattgcggaaaaacaaagtttctttttgatccaaacacaaagaaaaacttnnttgtgttttttttaatgatcttttncttgatcataaaaaaaagtaaaaaatgca

SEQ ID NO: 2200 - DNA, 522 bp, Homo sapien
ccgcatcctagccgccgactcacacaaggcagagttgccatggagaaaattccagtgtcagcattcttgctccttgtggccctctcctacactctggccagagataccacagtcaaacctggagccaaaaaggacacaaaggactctcgacccaaactgccccagaccctctccagaggttggggtgaccaactcatctggactcagacatatgaagaagctctatataaatccaagacaagcaacaaacccttgatgattattcatcacttggatgagtgcccacacagtcaagctttaaagaaagtgtttgctgaaaataaagaaatccagaaattggcagagcagtttgtcctcctcaatctggtttatgaaacaactgacaaacacctttctcctgatggccagtatgtccccaggattatgtttgttgacccatctctgacagttagagccgatatcactggaagatattcaaaccgtctctatgcttacgaacctgcagatacagcttctgttgct

SEQ ID NO: 2201 - DNA, 282 bp, Homo sapien
  misc_feature (1)...(282): n = A,T,C or G
actgaggaaatctnttgtaaagtgagctttgggtataacttagccccatcattatttagagaatagaggaggaagaaagaggaaggattttaaaggcagacaatgacagaccattcaggataggtggggttttaaagggagataaacacagtctcatcaactaaggagagatttgctgcagtaaataggatgagggaaatagtctgtgggatgcaagcnaaggaagcagggtgccttagacactgagtggagccagaaagatcatgcggnctttttccaagt

SEQ ID NO: 2202 - DNA, 217 bp, Homo sapien
  misc_feature (1)...(217): n = A,T,C or G
acctattttgganntagacttgaaaagaaagtgctagcacagtttgtgttgtggatttgctacttccatagtttacttgacatggttcanactgaccaatgcatttttttcagtgacagtctgtagcagttgaagctgtgaatgtgctaggggcaagcatttgtctttgtatgtggtgaattttttcantgtaacaacattatctgaccaatagtac

SEQ ID NO: 2203 - DNA, 597 bp, Homo sapien
acactgattcagtatccacagtccagaaggagttcttgaacatctagttcatatccccaaaaaatgtgaaaagactcctaaacacccaagttattacacaatgggaagctgatattggcttgtattaaaatccaggtgaatatcaaacataatcacagccttaacagtggtgctagaataagtgatgacaatatgtgcacagctgtatacagatcactattaaacacaggaacaaaatgccacttgatgcatatcaaaaagccaatttgaatatatttatttcatttacattgatacagtattagaagggactgaatataattatggagactgctgcaaacatttgatgccactaagtattctattaagcatcaggcatgcacagtagttaccttttaaagtttctcatgtatatatcttaacacatatatcttaagctacaatatgtttaaagcatttagtcattttaaacccaaatattttaattgacctatgtctaaatggagaaaaacagaaacttcctcctgtctcaatacccgatggcaatattaaaccttactccccaaattgatatttaaacttatttatgtcatcttt

SEQ ID NO: 2204 - DNA, 259 bp, Homo sapien
acgtgggtgaggggatggaggaaggcgagttttcagaggcccgtgaagatatggctgcccttgagaaggattatgaggaggttggtgtggattctgttgaaggagagggtgagaaagaaggagaggaatactaattatccattccctttggccctgcagcatgtcatgctcccagaatttcagcttcagcttaactgacagacgttaaagctttctggttagattgttttcacttggtgatcatgtcttttccatgtgt

SEQ ID NO: 2205 - DNA, 465 bp, Homo sapien
  misc_feature (1)...(465): n = A,T,C or G
acaactattnnattagtcttctactgccctacagctacagagcaggcacctctgtgggcatatattgcttgtgcctgtggccttttcatttaccagtctttggatgctattgatgggaaacaggcaagaagaaccaatagtagttctcctctgggagaactttttgatcatggctgtgattcactatcaacagtttttgtggttcttggaacttgtattgcagtgcagctggggacaaaccctgattggatgtttttttgttgttttgcggggacatttatgttctattgtgcgcactggcaaacgtatgtttctggaacattgcgatttggaataattgatgtgactgaagtgcagatcttcataataatcatgcatttgctggcagtgattggaggaccacctttttggcaatctatgattccagtgctgaatattcaaatgaaaatttttcctgcactttgt

SEQ ID NO: 2206 - DNA, 379 bp, Homo sapien
acagaattgccaagggttaccagacctctccagatctgcgattgacctggttgcagaacatggcaggcaagcactcagaacgaagcaatcatgctgaagctgcacagtgtctagtccactcagcagcacttgttgctgaatatttgagcatgctggaggaccggaaatatcttcctgtgggatgtgtaacatttcagaatatttcatctaatgttttagaagaatctgcggtctcagatgatgtggtatctccagatgaagaaggtatctgctctggaaaatactttactgagtcaggacttgtgggattactggaacaagcagctgcttccttctctatggctggcatgtatgaagcagttaatgaagtttacaaagt

SEQ ID NO: 2207 - DNA, 101 bp, Homo sapien
  misc_feature (1)...(101): n = A,T,C or G
acctgctgnnagtctgcctatgccagaaggattaaggaggggaggttacccaagaaacaaagcctacatgccgcttacagcccccgttggatggttgctca

SEQ ID NO: 2208 - DNA, 255 bp, Homo sapien
  misc_feature (1)...(255): n = A,T,C or G
acaatgaattcctcgatttttnaaggctgaccctgtttccttggttaacaatttcaatttaggccttataggaaaaaacgtaagggatcctttatctgcctccaactaggtaagttatttgataccactgacagcttaaaaagtaatgtcctaacctttctgaagattctggttgccataaccatgctactacagtctgttgttagtttgctctattaaaactaattggtctggagaaaacctacctgcagttgt

SEQ ID NO: 2209 - DNA, 550 bp, Homo sapien
  misc_feature (1)...(550): n = A,T,C or G
accaactctaanccacactggactaattcagatggagggatactttccaaactaatcagatgcctaataaagtgttggagtatacgtgtggacatgtagaagggatagttgcgaatgtctgaccttgtggaaatttccaaagatgtctacccataaacggtaattggcagtgttcatgactgaattaaatttagtcttttaaatcttgtcagacaaggatcccagagtgattctggcacatcactcttcttatggataatctaccaccagaagataaacctcagtaaatctgagatagttttaaaattacaagaatatttagaaacttcaagtgagtaagtatataaaatgtaagctggaaaaagcagcctttgaaatgagacactagaatatctttggtagataaaaactctattatttcaaggagagagtttttgtttctggaaagtgctaagtttgtgtaacataaaangcattactaaattcangtgacanggtaaaagaatattttttttaagaaataataaaaccatgcatattggattcctaa

SEQ ID NO: 2210 - DNA, 357 bp, Homo sapien
  misc_feature (1)...(357): n = A,T,C or G
tacccccacaaaatctgcattgtccatgtgagtaaagtaaaataattcctgttatttttttctgttagaaataagtatggaggatatgtttttaaaaatttatgagttaattgaaatatccatatataacaagtgactttctcacaatatatatgatgtgatatatagggagatagtttcactttcatcatattttatacgttgattctgaactatagaaaaataataaatgggattttaattatagctcttagttgggaaagaaatatagagagatgtgggatttgaatgcccatgaaagacattttattttacttgaatatattcttgcttnactttaccctccataatatgttg

SEQ ID NO: 2211 - DNA, 387 bp, Homo sapien
  misc_feature (1)...(387): n = A,T,C or G
acttacgctatcntcagaatataaagaactgcctcaaaatagaaggccatttagctgtgcagcctactttcactgaaggttcattgtttttcctgttacatggagaagaatgtgcccagaaaataagagctttagttgatcaccatgatgcagaggtgaaggaaaaggttgtaacaataatacccaaaatctgattggtcatatttttccaaagagtaatgcagtctggatataaatgtattttctgtcttccttataaggggattctcccagctgctaaatttaaacagtaaatatcacattttgtcattaacacagctataacttgccgtngttctcaggatttattttggactattttgatgccaagtgaatataagagtttgt

SEQ ID NO: 2212 - DNA, 276 bp, Homo sapien
  misc_feature (1)...(276): n = A,T,C or G
acctagcataaaaactctgcagagaagtattcccaataaggaaatagcattgaaatgttaaatacaatttctgaaagttatgttttttttctatcatctggtataccattgctttatttttataaattattttctcattgccattggaatagatatctcagattgtgtagatatgctatttaaataattnntcaggaaatactgcctgtagagttagtatttctatttttatataatgtttgcacactgaattgaagaattgttggttttttcttt

SEQ ID NO: 2213 - DNA, 268 bp, Homo sapien
actcctcgggcaacagccttttcaccagctcaaatccaaacttgcggatgagcttggtgaacaggttccgaagcttcatgcggaagtgccgccgcatgtcatctgaaagcttcccaatggcttccatcaccagctgcacatgtttggccaggtgcgccacgtccatgacagtcactgccaccttgatgaagcccagtgcagacttgaccacgtcacgggtgcgggaggccagaagcaggcacacattctccagcagctgctccactgt

SEQ ID NO: 2214 - DNA, 507 bp, Homo sapien
  misc_feature (1)...(507): n = A,T,C or G
acaaaaggcttanntaagttttctttgctgaatttgatggatgtttttctgttgtgtaatctgatatgccagtttgcttaaaacatttgccaacacattatgaagttattaaatttaagggacagaggtagtatagttagatatactttctcttaggaaaaataatgggcaaaaatttttgttgcaacttttcatatatattttccccttaccaattgttttatccttatagtattgtaggccctgaaagtagaatttttctttaacttattttgagatttgagatttaaattttatgtattgtttacagtcagagtaaatcactggatttcttttgtttgttttgatttgctctgttttattcagtcaaatctagagttcgaatcctctgctaaagaatttncatccactggtgtaaacagtgaaaggtattttgcttgttgaaaaaaaaaactggcaaagtgaaaagatacagtcaaaaaatctanaatttctttaattttgctt

SEQ ID NO: 2215 - DNA, 126 bp, Homo sapien
acagaaggggaaagactttaagcaaccatgatgaccttggaaactggttatgtgccttatttaacatataattataattaaagttaactaaagtctattccatcttcctttactatggttgcaagt

SEQ ID NO: 2216 - DNA, 290 bp, Homo sapien
  misc_feature (1)...(290): n = A,T,C or G
acacataaagtttannctggttatgacaaaagcctatagttgtgtttcttgaactataaagaaaacaaattttggcagtctttaagtatatatagcttaaaatataatttttagcatttggcaccatatgtatgccattatatttgattttgcattactgtttcacaatgaagctttctttaaggctttgatttttatgattatgaaagaaataaggcacaaccacagtttttctttcttaaatttcatcactgttgatgtggttcttttgtgttaaaaaaaagtgcaac

SEQ ID NO: 2217 - DNA, 333 bp, Homo sapien
tgattgatatccagaccaggatggctgggcgagcattggagcttctttatctgccagagaataagccctgttacctgctggatattggctgtggcactgggctgagtggaagttatctgtcagatgaagggcactattgggtgggcctggatatcagccctgccatgctggatgaggctgtggaccgagagatagagggagacctgctgctgggggatatgggccagggcatcccattcaagccaggcacatttgatggttgcatcagcatttctgctgtgcagtggctctgtaatgctaacaagaagtctgaaaaccctgccaagcgcctgt

SEQ ID NO: 2218 - DNA, 335 bp, Homo sapien
  misc_feature (1)...(335): n = A,T,C or G
acaaaaaaaaccttacataaattaagaatgaatacatttacaggcgtaaatgcaaaccgnntccaactcaaagcaagtaacagtccacggtgttctggccaaagacatcagctaagaaaggaaactgggtcctacggcttggactttccaaccctgacagacccgcaagacaaaacaactggttcttgccagcctctanagaaatcccagaacactcagccctgacacgttaataccaaggggaacagttaaccttcaatacaaggtcaaaatcagcaacaaagttctacaatccagngctgatatcagatacaagcttcaaggacaatttcttt

SEQ ID NO: 2219 - DNA, 536 bp, Homo sapien
  misc_feature (1)...(536): n = A,T,C or G
actcactcaccctacctccagggcatagtcagtctgggctgagatccccatgatcagatatttgatggaaagtcctgaaaggccaatgagttggatggcaagaatgcaggcagtagctgctggataaaataggctacagccacctcagatgctttcagtgctctgtctgaggatgtgtatatgcatatgcaaactcgacccccgttcctgcccagataatggctcaataactctgaggctggttgctcagcctctgagggcaatacaggcatttaaaaaattaagatgaccaggcacagtggctcacgcctgtgatctcggcactttgggagactgaggtgggagcatcacttgagaccgggagtttgggaccaggctgggcaacacagggagacccctctctacaaaaacatttttaaaaaattagctgggtgtggtgatgcatgcctgtggtcccagttacttgggaggctgacgtgggtggctcacttgancacaggagtttgaggctgcagtgacctatgaccacatcactg

SEQ ID NO: 2220 - DNA, 347 bp, Homo sapien
  misc_feature (1)...(347): n = A,T,C or G
acccatggtaaatgtaaatatactgtgtctcttttgggagagccttttagtagaggagtcttatatgagtctctacataagtagtttcacttgagttttgcagtttgaaatcttaaaggagctttaattgacatttattataccaattaagcttggaatggggcaatggatgcatttcccaaaacgtgtgaaagcactaacagcttatattgctgaatgagaatctcctgggtgtaatttagccacttagggaactgcgtgaacactcccaggccattatgatgctgttacagcttcagtgtataaatgcatgagtattctttctgttctgttttgngctctcttgt

SEQ ID NO: 2221 - DNA, 224 bp, Homo sapien
acgaactccacggcggtggggcgctaactagcagggacccctgcaagtgttggtcgggggcctcgagctgcctgagctgacacgaggggaggggtctgtgtagccaacaggtgaccgaagggcttgcctgcccacagcttacttggccaaggggtttctgaagttcctgccggcaaacttagccttgctgcccagctcctcttcaattctgaggagctggttgt

SEQ ID NO: 2222 - DNA, 270 bp, Homo sapien
acagagaaattcacaagtgtaaaaatattgcacattgacaaataccaagaatttttgcgtatgtttatattgtattgttctaaataatgggtagcctgtgaaataagatcttgccacccatgtaataatagtagtaatactatagttaaaatggctgtaagaatagttttataaaagtgaatacacagatctattgtatttgaaacataactttgacaattattagtgtgaccaaagtattaggcggttttcatacatttttcaccttgt

SEQ ID NO: 2223 - DNA, 394 bp, Homo sapien
ctgcagaacaaatcaagcacatccttgctaatttcaaaaactaccagttctttattggtgaaaacatgaatccagatggcatggttgctctattggactaccgtgaggatggtgtgaccccatatatgattttctttaaggatggtttagaaatggaaaaatgttaacaaatgtggcaattattttggatctatcacctgtcatcataactggcttctgcttgtcatccacacaacaccaggacttaagacaaatgggactgatgtcatcttgagctcttcatttattttgactgtgatttatttggagtggaggcattgtttttaagaaaaacatgtcatgtaggttgtctaaaaataaaatgcatttaaactcaaaaaaaaaaaaaaaaaaa

SEQ ID NO: 2224 - DNA, 508 bp, Homo sapien
  misc_feature (1)...(508): n = A,T,C or G
acagataaggtaaggagcaatcctgtgaaagagttcataaatatcttttattttctaaaattcaatatacataagacattggtgtgattttacatttcttacattagaaataatggctcttgaactacttatttctatttgctatcccttagtttgctcttcagtctcttccattgtagtttttaaaagatgcttgcaattttttattctgagttgtaggtaatgcacataccgggggcattttttttttgtctccttaaaattttagagactttctggatttttgacttggaactggttcttcatccatcatcttatcttatataacccccttatatataacacccgggtgtgttctgagagtctgttcttaatttctttcctcaccaaatctctttcccaatgctgntgcaagaacatgtcctcctctgccatctgccattcctncttttcttactccacctacagtttcttnccttaaatattctccagngcagaatggctcaca

SEQ ID NO: 2225 - DNA, 129 bp, Homo sapien
  misc_feature (1)...(129): n = A,T,C or G
gaaagggagccacncnactgattggagggccctatcttgtgagtggggcatctgttggactttccacctggtcatatactctgcagctgttnnaatgtgcaannacttggggacagcatgagcttgctg

SEQ ID NO: 2226 - DNA, 490 bp, Homo sapien
  misc_feature (1)...(490): n = A,T,C or G
gcgagtcgccgctgcagccctagtgactgcggcctgcatcccgattgtcttctcctccaaggtctacatgattacctgaagtttaataagtaagaccatgaattatggcatttcttaaatgaagcgttcaagaagtgagagaatgtcatagaaaataaatgatttttaagttatgtctattaatctgactgtagatatatatatttacctccttagtaatgcaagaagtgtttgtgggaagcagagaagcaagcaactgtatttcttgttctcacctaagcattactggaggataagccacatcagtctacaaagaggttttcatacaaacataataagatgtaaatggaccaaaagtgaagcacattcttgcagtaagcactgttactctccaagcaaccatggtttacatattgggattttgaaacttagcacttctgctcccaagggacttacaaaagtgaacatttgtatgtnccgtattaaaagt

SEQ ID NO: 2227 - DNA, 441 bp, Homo sapien
  misc_feature (1)...(441): n = A,T,C or G
tnctaaaacttgnttttcttaaaaaatagttgttgtaacattaaaccataacctaatcagtgtgttcactatgcttccacactanccagtcttctcacacttcttctggtttcaagtctcaaggcctgacagacagaagggcttggagattttttttctttacaattcagtcttcagcaacttgagagctttcttcatgttgtcaagcaacagagctgtatctgcaggttcgtaagcatagagacgatttgaatatcttccagtgatatcggctctaactgtcagagatgggtctgcanagataaatgaagcaaaanggaatggaatggtttgttttcaaacaacctgnatttattgccccggggagctgaagttcatgtattcatgtcctnngagggaatggagtgngtntncactnacaggagctctgatccatccact

SEQ ID NO: 2228 - DNA, 388 bp, Homo sapien
  misc_feature (1)...(388): n = A,T,C or G
tagcctncaaatgganggtgactggccctggctcctgctatgagaagataaccagcctcattttctcagtgccccagaggtctaggataggatttctaaactggaatcatccttaatcaccttgaagatcccttaagaggcatttgactggtgctgccgtctgtgtcctcaaagcaatgctggtggcagcgtnctgtgtacctgcccgagcggccgcccgggcaggtactaaaatagatgtaaaaaattctggatttgaaaactgttggtttttaaaagagaaatatttttaaattcttattttaggatgaggatatgttcatgaaatttgtaagtgaagatcttcatcgggtgtgcacttttaacaggnttgaacctattcatatag

SEQ ID NO: 2229 - DNA, 261 bp, Homo sapien
  misc_feature (1)...(261): n = A,T,C or G
aggtactatagggtaaatacgggccctatttcaaagatttttaggggaattaattctaggacgatgggcatgaaactgtggtttgctccacagatttcagagcattgaccgtagtatacccccggtcgtgtagcggtgaaagtggtttggtttanacgtccgggaattgcatctgtttttaagcctaatgtggggacagctcatgagtgcaagacgtcttgtgatgtaattattatacgaatgggggcttcaatcgggagt

SEQ ID NO: 2230 - DNA, 466 bp, Homo sapien
  misc_feature (1)...(466): n = A,T,C or G
gttttggtgtggatcgattctgtttgggacacactggcactgcagtagggaagctgttgacgcttggaggacttgggatttggtggtttgttgaccttattttgctaattactggagggctgatgccaagtgatggcagcaactggtgcactgtttactaaaaagagctgccatcatggcccagggaggcgggtgaaagctccgtcttctgaattcatctctacaggctcaaaactcctctttgatatcagacctgatgttattttccttcttttggagggcatttgtttggttaagaaggcttctttggactttggaatttcaacccagattttaccttgcagacggaatgacaagcaaaaagtgttgtggggaatcaaatttgttcctttcctcatgcacaaaacataaaggatagtggcgagtttacaagctgtggatgggtttccatantcttcctttctgt

SEQ ID NO: 2231 - DNA, 371 bp, Homo sapien
  misc_feature (1)...(371): n = A,T,C or G
actgaaaaaaatgtctaaggcctttacagaaacatttttagtaatgaggatgagaactttttcaaatagcaaatatatattggcttaaagcatgaggctgtcttcagaaaagtgatgtggacataggaggcaatgtgtgagacttgggggttcaatattttatatagaagagttaataagcacatggtttacatttactcanctactatatatgcagngtggtgcacattttcacagaattctggcttnattaagatcattatttttgctgcgtngcttacagacttagcatattagttttttctactcctacaagtgtaaattgaaaaatctttatattaaaaaagtaaactgttatgaanctgctatgt

SEQ ID NO: 2232 - DNA, 2520 bp, Homo sapiens
  misc_feature (1)...(2520): n = A,T,C or G
gtgggaccgctgaccgcgcggctgctccgctctccccgctccaagcgccgatctgggcacccgccaccagcatggacgctcgccgcgtgccgcagaaagatctcagagtaaagaagaacttaaagaaattcagatatgtgaagttgatttccatggaaacctcgtcatcctctgatgacagttgtgacagctttgcttctgataattttgcaaacacgaggctgcagtcagttcgggaaggctgtaggacccgcagccagtgcaggcactctggacctctcagggtggcgatgaagtttccagcgcggagtaccaggggagcaaccaacaaaaaagcagagtcccgccagccctcagagaattctgtgactgattccaactccgattcagaagatgaaagtggaatgaattttttggagaaaagggctttaaatataaagcaaaacaaagcaatgcttgcaaaactcatgtctgaattagaaagcttccctggctcgttccgtggaagacatcccctcccaggctccgactcacaatcaaggagaccgcgaaggcgtacattcccgggtgttgcttccaggagaaaccctgaacggagagctcgtcctcttaccaggtcaaggtcccggatcctcgggtcccttgacgctctacccatggrgagagccagtttkgarkmtmwgtacatgttggtgagaaagaggaagaccgtggatggctacatgaatgaagatgacctgcccagaagccgtcgctccagatcatccgtgacccttccgcatataattcgcccagtggaagaaattacagaggaggagttggagaacgtctgcagcaattctcgagagaagatatataaccgttcactgggctctacttgtcatcaatgccgtcagaagactattgataccaaaacaaactgcagaaacccagactgctggggcgttcgaggccagttctgtggcccctgccttcgaaaccgttatggtgaagaggtcagggatgctctgctggatccgaactggcattgcccgccttgtcgaggaatctgcaactgcagtttctgccggcagcgagatggacggtgtgcgactggggtccttgtgtatttagccaaatatcatggctttgggaatgtgcatgcctacttgaaaagcctgaaacaggaatttgaaatgcaagcataatatctggaaaatttgctgcctgccttctacttctcaaatctttcttgtaaaagtttccaattttttcactgaaacctgagttaaaaatcttgatgatcagcctgtttcataagaaactccaatcaagttaatcttagcagacatgtgtttctggagcatcacagaaggtatattgctagttacactttgccctcctgcagtttcttctctgctcccaacccccatctcatagcatccccctctatttccaatgctcctctccaaccgcttagtttctgaatttcttttaaattacagttttatgaaagcatattttatttacttggtgttgaaatagccctcataaaacctaagcacttggaaacacaataatagtattaactaactagatctattgaatttcagagaagagccttctaacttgtttacacaaaaacgagtatgatttagcattcatactagttgaaatttttaatagaatcaaggcacaaaagtcttaaaaccatgtggaaaaattaggtaattattgcagattgatgtctctcaatcccatgtattgcgcttatgttacaagttgttgtcacagttgagacttaatttctcctaatttcttctgcccgaagggtaagtggtgcgtccagcttacacratcataattcaaaggttggtgggcaatgtaatacttaattaaaataatgatggaagagctatctggagattatgagtaagctgatttgaattttcagtataaaactttagtataattgtagtttgcaaagtttatttcagttcacatgtaaggtattgcaaataaattcttggacaattttgtatggaaacttgatattaaaaactagtctgtggttctttgcagtttcttgtaaatttataaaccaggcacaaggttcaagtttagattttaagcacttttataacaatgataagtgcctttttggagatgtaacttttagcagtttgttaacctgacatctctgccagtctagtttctgggcaggtttcctgtgtcagtattccccctcctctttgcattaatcaaggtatttggtagaggtggaatctaagtgtttgtatgtccaatttacttgcatatgtaaaccattgctgtgccattcaatgtttgatgcataattggaccttgaatcgataagtgtaaatacagcttttgatctgtaatgcttttatacaaaagtttattttaataataaaatgtttgttctaacttgtctgctttttttaaaaataatcttactgtacttaattctaattttttcctcatatttaaataaaaggccatttccaccttttctaaaaa

SEQ ID NO: 2233 - DNA, 3411 bp, Homo sapiens
  misc_feature (1)...(3411): n = A,T,C or G
gtgggaccgctgaccgcgcggctgctccgctctccccgctccaagcgccgatctgggcacccgccaccagcatggacgctcgccgcgtgccgcagaaagatctcagagtaaagaagaacttaaagaaattcagatatgtgaagttgatttccatggaaacctcgtcatcctctgatgacagttgtgacagctttgcttctgataattttgcaaacacgaggctgcagtcagttcgggaaggctgtaggacccgcagccagtgcaggcactctggacctctcagggtggcgatgaagtttccagcgcggagtaccaggggagcaaccaacaaaaaagcagagtcccgccagccctcagagaattctgtgactgattccaactccgattcagaagatgaaagtggaatgaattttttggagaaaagggctttaaatataaagcaaaacaaagcaatgcttgcaaaactcatgtctgaattagaaagcttccctggctcgttccgtggaagacatcccctcccaggctccgactcaaccagttcttgtttatatacagtagtgttttgggcacacctaaggtcgatctgtgttgtatttaaaaatctaatttctttatttgtgtggccttctagacaaacgaaggggacccagaggaaaccccctgacagatctctggatgatcctccttgaatcctgggcagtttggtctctccttgctgtgctcctgtggcactaaactccttttgattggttctttctttccttcccagctagactaagcccctcatgggcaggtaatgaagattgaaaacttttttctgttctccagtgtgagcacattcctcctacatggtagatgtgcaatagatgtttttaaaattggagaatgaaaataaaagaagaaaatcacaatttcttatcaagttgtagcttggtatcatacacaattgcattctgaggaattaaggtggtaccttagggagatttggtgtgtctgctgtgatagaaaagatttctttttcctagctttccctgaggaaaggaaagatggaaagagggaagccatacagatatccctctgttttgcagtgtagaaactgaatgtgtttctacagggtcaagagacatcagagaaatttttttttttttagaacagaagatcatttcttacatcttcattaagtaaaagaataaatagctcatctctcaagttgaaagaaactgggcttggtattattacaaaagcaaaattaaaatggccatataggttttaggctcattttgccatgcattatgcaaaggacaaagaaaaagaaaaaatagagctctctttacttaaaacatccttaaggagaagctatgaattccccaaagtactacttctctttattatggaataaatggattcccttatacgtgctttgtttagcaatcaaggagaccgcgaaggcgtacattcccgggtgttgcttccaggagaaaccctgaacggagagctcgtcctcttaccaggtcaaggtcccggatcctcgggtcccttgacgctctacccatnnnnnnnnnnnnnnnnnnnnnnnnntacatgttggtgagaaagaggaagaccgtggatggctacatgaatgaagatgacctgyccagaagccgtcgctccagatcatccgtgacccttccgcatataattcgcccagtggaagaaattacagaggaggagttggagaacgtctgcagcaattctcgagagaagatatatwaccgttcactgggctctacttgtcatcaatgccgtcagaagactattgataccaaaacaaactgcagaaacccagactgctggggcgttcgaggccmgttctgtggcccctgccttcgaaaccgttatggtgaagaggtcagggatgctctgctggatccgaactggcattgcccgccttgtcgaggaatctgcaactgcagtttctgccggcagcgagatggacggtgtgcgactggggtccttgtgtatttagccaaatatcatggctttgggaatgtgcatgcctacttgaaaagcctgaaacaggaatttgaaatgcaagcataatatctggaaaatttgctgcctgccttctacttctcaaatctttcttgtaaaagtttccaattttttcactgaaacctgagttaaaaatcttgatgatcagcctgtttcataagaaactccaatcaagttaatcttagcagacatgtgtttctggagcatcacagaaggtatattgctagttacactttgccctcctgcagtttcttctctgctcccaacccccatctcatagcatccccctctatttccaatgctcctctccaaccgcttagtttctgaatttcttttaaattacagttttatgaaagcatattttatttacttggtgttgaaatagccctcataaaacctaagcacttggaaacacaataatagtattaactaactagatctattgaatttcagagaagagccttctaacttgtttacacaaaaacgagtatgatttagcattcatactagttgaaatttttaatagaatcaaggcacaaaagtcttaaaaccatgtggaaaaattaggtaattattgcagattgatgtctctcaatcccatgtattgcgcttatgttacaagttgttgtcacagttgagacttaatttctcctaatttcttctgcccgaagggtaagtggtgccgtccagcttacacaatcataattcaaaggttggtgggcaatgtaatacttaattaaaataatgatggaagagctatctggagattatgagtaagctgatttgaattttcagtataaaactttagtataattgtagtttgcaaagtttatttcagttcacatgtaaggtattgcaaataaattcttggacaattttgtatggaaacttgatattaaaaactagtctgtggttctttgcagtttcttgtaaatttataaaccaggcacaaggttcaagtttagattttaagcacttttataacaatgataagtgcctttttggagatgtaacttttagcagtttgttaacctgacatctctgccagtctagtttctgggcaggtttcctgtgtcagtattccccctcckctttgcattaatcaaggtatttggtagaggtggaatctaagtgtttgtatgtccaatttacttgcatatgtaaaccattgctgtgccattcaatgtttgatgcataattggaccttgaatcgataagtgtaaatacagcttttgatctgtaatgcttttatacaaaagtttattttaataataaaatgtttgttctaacttgtctgctttttttaaaaataatcttactgtacttaattctaattttttcctcatatttaaataaaaggccatttccaccttttct

SEQ ID NO: 2234 - DNA, 1116 bp, Homo sapiens
  misc_feature (1)...(1116): n = A,T,C or G
atggacgctcgccgcgtgccgcagaaagatctcagagtaaagaagaacttaaagaaattcagatatgtgaagttgatttccatggaaacctcgtcatcctctgatgacagttgtgacagctttgcttctgataattttgcaaacacgaggctgcagtcagttcgggaaggctgtaggacccgcagccagtgcaggcactctggacctctcagggtggcgatgaagtttccagcgcggagtaccaggggagcaaccaacaaaaaagcagagtcccgccagccctcagagaattctgtgactgattccaactccgattcagaagatgaaagtggaatgaattttttggagaaaagggctttaaatataaagcaaaacaaagcaatgcttgcaaaactcatgtctgaattagaaagcttccctggctcgttccgtggaagacatcccctcccaggctccgactcacaatcaaggagaccgcgaaggcgtacattcccgggtgttgcttccaggagaaaccctgaacggagagctcgtcctcttaccaggtcaaggtcccggatcctcgggtcccttgacgctctacccatggrgagagccagtttkgarkmtmwgtacatgttggtgagaaagaggaagaccgtggatggctacatgaatgaagatgacctgcccagaagccgtcgctccagatcatccgtgacccttccgcatataattcgcccagtggaagaaattacagaggaggagttggagaacgtctgcagcaattctcgagagaagatatataaccgttcactgggctctacttgtcatcaatgccgtcagaagactattgataccaaaacaaactgcagaaacccagactgctggggcgttcgaggccagttctgtggcccctgccttcgaaaccgttatggtgaagaggtcagggatgctctgctggatccgaactggcattgcccgccttgtcgaggaatctgcaactgcagtttctgccggcagcgagatggacggtgtgcgactggggtccttgtgtatttagccaaatatcatggctttgggaatgtgcatgcctacttgaaaagcctgaaacaggaatttgaaatgcaagcataa

SEQ ID NO: 2235 - protein, 371 aa, Homo sapiens
  variant (1)...(371): Xaa = Any amino acid
MDARRVPQKDLRVKKNLKKFRYVKLISMETSSSSDDSCDSFASDNFANTRLQSVREGCRTRSQCRHSGPLRVAMKFPARSTRGATNKKAESRQPSENSVTDSNSDSEDESGMNFLEKRALNIKQNKAMLAKLMSELESFPGSFRGRHPLPGSDSQSRRPRRRTFPGVASRRNPERRARPLTRSRSRILGSLDALPMXRASXEXXYMLVRKRKTVDGYMNEDDLPRSRRSRSSVTLPHIIRPVEEITEEELENVCSNSREKIYNRSLGSTCHQCRQKTIDTKTNCRNPDCWGVRGQFCGPCLRNRYGEEVRDALLDPNWHCPPCRGICNCSFCRQRDGRCATGVLVYLAKYHGFGNVHAYLKSLKQEFEMQA

SEQ ID NO: 2236 - DNA, 21 bp, Artificial Sequence
  Primer
cacgacgttgtaaaacgacgg

SEQ ID NO: 2237 - DNA, 20 bp, Artificial Sequence
  Primer
cacaggaaacagctatgacc

What is claimed is:

1. An isolated polynucleotide comprising a sequence selected from the group consisting of:
(a) sequences provided in SEQ ID NO:1-2234;
(b) complements of the sequences provided in SEQ ID NO:1-2234;
(c) sequences consisting of at least 20 contiguous residues of a sequence provided in SEQ ID NO:1-2234;
(d) sequences that hybridize to a sequence provided in SEQ ID NO:1-2234, under moderately stringent conditions;
(e) sequences having at least 75% identity to a sequence of SEQ ID NO:1-2234;
(f) sequences having at least 90% identity to a sequence of SEQ ID NO:1-2234;and (g) degenerate variants of a sequence provided in SEQ ID NO:1-2234.

2. An isolated polypeptide comprising an amino acid sequence selected from the group consisting of:
(a) sequences encoded by a polynucleotide of claim 1; and
(b) sequences having at least 70% identity to a sequence encoded by a polynucleotide of claim 1; and
(c) sequences having at least 90% identity to a sequence encoded by a polynucleotide of claim 1; and
(d) sequences provided in SEQ ID NO:2235.

3. An expression vector comprising a polynucleotide of claim 1 operably linked to an expression control sequence.

4. A host cell transformed or transfected with an expression vector according to claim 3.

5. An isolated antibody, or antigen-binding fragment thereof, that specifically binds to a polypeptide of claim 2.

6. A method for detecting the presence of a cancer in a patient, comprising the steps of:
(a) obtaining a biological sample from the patient;
(b) contacting the biological sample with a binding agent that binds to a polypeptide of claim 2;
(c) detecting in the sample an amount of polypeptide that binds to the binding agent; and
(d) comparing the amount of polypeptide to a predetermined cut-off value and therefrom determining the presence of a cancer in the patient.

7. A fusion protein comprising at least one polypeptide according to claim 2.

8. An oligonucleotide that hybridizes to a sequence recited in SEQ ID NO:1-2234 under moderately stringent conditions.

9. A method for stimulating and/or expanding T cells specific for a tumor protein, comprising contacting T cells with at least one component selected from the group consisting of:
(a) polypeptides according to claim 2;
(b) polynucleotides according to claim 1; and
(c) antigen-presenting cells that express a polynucleotide according to claim 1, under conditions and for a time sufficient to permit the stimulation and/or expansion of T cells.

10. An isolated T cell population, comprising T cells prepared according to the method of claim 9.

11. A composition comprising a first component selected from the group consisting of physiologically acceptable carriers and immunostimulants, and a second component selected from the group consisting of:
(a) polypeptides according to claim 2;
(b) polynucleotides according to claim 1;
(c) antibodies according to claim 5;
(d) fusion proteins according to claim 7;
(e) T cell populations according to claim 10; and
(f) antigen presenting cells that express a polypeptide according to claim 2.

12. A method for stimulating an immune response in a patient, comprising administering to the patient a composition of claim 11.

13. A method for the treatment of a cancer in a patient, comprising administering to the patient a composition of claim 11.

14. A method for determining the presence of a cancer in a patient, comprising the steps of:
(a) obtaining a biological sample from the patient;
(b) contacting the biological sample with an oligonucleotide according to claim 8;
(c) detecting in the sample an amount of a polynucleotide that hybridizes to the oligonucleotide; and
(d) compare the amount of polynucleotide that hybridizes to the oligonucleotide to a predetermined cut-off value, and therefrom determining the presence of the cancer in the patient.

15. A diagnostic kit comprising at least one oligonucleotide according to claim 8.

16. A diagnostic kit comprising at least one antibody according to claim 5 and a detection reagent, wherein the detection reagent comprises a reporter group.

17. A method for inhibiting the development of a cancer in a patient, comprising the steps of:
(a) incubating CD4+ and/or CD8+ T cells isolated from a patient with at least one component selected from the group consisting of: (i) polypeptides according to claim 2; (ii) polynucleotides according to claim 1; and (iii) antigen presenting cells that express a polypeptide of claim 2, such that T cell proliferate;
(b) administering to the patient an effective amount of the proliferated T cells, and thereby inhibiting the development of a cancer in the patient.
